(19) United States
(12) Patent Application Publication
(10) Pub. No.: US 2024/0226191 A1
(43) Pub. Date: Jul. 11, 2024

(54) COMPOSITIONS AND METHODS FOR TREATING DISEASE

(71) Applicant: MICROBA IP PTY LTD, Brisbane City, Queensland (AU)

(72) Inventors: Páraic Ó CUÍV, Brisbane (AU); Lutz KRAUSE, Brisbane (AU)

(21) Appl. No.: 18/560,020

(22) PCT Filed: May 10, 2022
(86) PCT No.: PCT/AU2022/050442

§ 371 Date: Nov. 9, 2023

(30) Foreign Application Priority Data
May 10, 2021 (AU) 2021901387
May 6, 2022 (AU) 2022901200

(51) Int. Cl. A61K 35/74; A61K 35/00; A61P 1/04; A61P 29/00; A61P 37/02; C12N 1/20

(52) U.S. Cl. CPC A61K 35/74; A61P 1/04; A61P 29/00; A61P 37/02; C12N 1/205; A61K 2035/11

(57) ABSTRACT

This disclosure relates generally to the field of therapeutic compositions comprising bacterial strains and methods for the treatment or prevention of disease. More particularly, the disclosure relates to compositions comprising bacterial strains isolated from the human digestive tract and their use in the treatment or prevention of inflammatory and autoimmune disorders.

### RELATED APPLICATIONS

[0001] This invention claims priority to Australian Provisional Application Nos. 2021901387 entitled “Compositions and Methods for Treating Disease” filed 10 May 2021, and 2022901200 entitled “Compositions and Methods for Treating Disease” filed 6 May 2022, the entire contents of which are incorporated herein by reference.

### FIELD OF THE INVENTION

[0002] This invention relates generally to the field of therapeutic compositions comprising bacterial strains and methods for the treatment or prevention of disease. More particularly, the present invention relates to compositions comprising bacterial strains isolated from the human digestive tract and their use in the treatment or prevention of inflammatory and autoimmune disorders.

### BACKGROUND OF THE INVENTION

[0003] The human gut microbiota contains more than 500-1000 different phylotypes belonging to a few bacterial phylum, including Firmicutes, Bacteroidetes, Proteobacteria, Fusobacteria, and Verrucomicrobia. The two major phyla, the Bacteroidetes and the Firmicutes, represent over 90% of the gut microbiota (Arumugam et al., 2011). The successful symbiotic relationships arising from bacterial colonisation of the human gut have yielded a wide variety of metabolic, structural, protective and other beneficial functions. The gut bacteria are key regulators of digestion along the gastrointestinal (GI) tract; with commensal bacterial playing an important role in the extraction, synthesis, and absorption of many nutrients and metabolites, including bile acids, lipids, amino acids, vitamins, and short-chain fatty acids (SCFAs). More recently, the immunological importance of the gut microbiota and their products in regulating the development, homeostasis, and function of innate and adaptive immune cells have been recognised (Brestoff and Atris, 2013).

[0004] It is now increasingly recognised that the gut microbiome regulates host intestinal mucosal immunity and predisposition to inflammation (Geva-Zatorsky et al., 2017; Kabat et al., 2014), opening new avenues for novel therapeutic interventions.

[0005] Dramatic changes in microbiota composition have been documented in many inflammatory and autoimmune disorders, including inflammatory bowel disease (IBD). In recognition of the potential positive effect that certain bacterial strains may have on the animal gut, various strains have been proposed for use in the treatment of various diseases. Certain strains, including Lactobacillus and Bifidobacterium strains, have been proposed for use in treating various extraintestinal inflammatory and autoimmune disorders (see, Goldin & Gorbach, 2008; Azad et al., 2013). However, the precise effects of particular bacterial strains locally at the GI tract and systemically throughout the body are unresolved. As a result, the relationships between different diseases and different bacterial strains in the human GI tract are yet to be clearly elucidated.

[0006] IBD (including the two major disease subtypes Crohn's disease (CD) and ulcerative colitis (UC)) is characterised by episodic and disabling inflammation of the GI tract. In 2017, it is estimated that 6.8 million people globally suffered from IBD, with the highest prevalence in the United States and Europe (GBD 2017; Inflammatory Bowel Disease Collaborators, 2019). Up to 20% of patients are diagnosed before the age of 16 and paediatric-onset IBD (PIBD) is associated with a more complicated and aggressive disease with adverse impacts on growth and psychosocial development.

[0007] There is currently no cure for IBD, and long-term clinical management requires effective therapeutics with an excellent safety profile. However, existing treatments show a range of deficiencies and remission is generally short. Moreover, PIBD therapeutics are ineffective where early onset coupled with more aggressive disease result in progressive bowel damage and need for surgery. There is an urgent need to develop more effective and safe therapies to improve patient quality of life, maintain remission over long periods, reduce surgery and curtail individual and public health costs.

[0008] Existing treatments for IBD are sub-optimal with strong adverse effects, low compliance (50% average non-adherence rates (see, Chan et al., 2017)) and high cost. Furthermore, there is no effective solution to maintaining extended periods of disease-free remission. Mesalmine, one of the most widely used first line therapies for mild to moderate flares of ulcerative colitis and for maintenance of remission, has response rates between 40%-70% and remission rates of 15%-20% (Karagozian & Burakoff, 2007).

[0009] There is a requirement in the art for new methods of treating inflammatory and autoimmune disorders. There is also a requirement for the potential effects of gut bacteria to be characterised so that new therapies using gut bacteria can be developed.

### SUMMARY OF THE INVENTION

[0010] The present invention is predicated in part on the inventors' identification that bacterial strains of Mediterraneibacter faecis enhance or improve gut barrier function. Based on this consideration, it is proposed that strains of M. faecis are particularly suited to therapeutic applications for treating and preventing inflammatory and autoimmune disorders, as described hereinafter.

[0011] The inventors have developed new compositions comprising a viable bacterial strain of the species Mediterraneibacter faecis that can be used for treating and preventing inflammatory and autoimmune disorders.

[0012] Accordingly, in one aspect the invention provides a cell of the Mediterraneibacter faecis strains deposited under any one of accession numbers V21/006223, V21/006224, V21/006225, or V21/006226, or a derivative thereof.

[0013] In some embodiments, the cell is at least partially isolated.

[0014] In another aspect, the invention provides a biologically pure culture of the Mediterraneibacter faecis strain deposited under any one of accession numbers V21/006223, V21/006224, V21/006225, or V21/006226, or a derivative thereof.

[0015] In another aspect, the present invention provides a composition comprising the cell or culture as described above and elsewhere herein.

[0016] In yet another aspect, the present invention provides a composition comprising a bacterial strain with a 16S rRNA sequence that is at least about 97.5%, 98%, 98.5% 99%, 99.1%, 99.2%, 99.3%, 99.4%, 99.5%, 99.6%, 99.7%, 99.8%, or 99.9%, identical to any one of SEQ ID NOs: 1-24; or with a 16S rRNA gene sequence represented by any one of SEQ ID NOs: 1-24. In some embodiments, the bacterial strain comprises two or more copies (e.g., two copies, three copies, four copies, five copies, six copies, seven copies, eight copies) of a 16S rRNA sequence independently selected form the 16S rRNA sequences set forth in SEQ ID Nos: 1-24.

[0017] In some embodiments, the composition further comprises a pharmaceutically acceptable excipient, diluent, or carrier.

[0018] In yet another aspect, the present invention provides a pharmaceutical composition comprising a bacterial strain with a 16S rRNA sequence that is at least about 97%, 98%, 99%, 99.5%, 99.6%, 99.7%, 99.8%, or 99.9% identical to the 16S rRNA sequence of a bacterial strain of the Mediterraneibacter faecis, together with a pharmaceutically acceptable carrier, diluent, or excipient.

[0019] In a related aspect, the present invention provides a pharmaceutical composition comprising an effective amount of a bacterial strain that is a phylogenetic descendant of the most recent common ancestor (MRCA) of M. faecis and M. lactaris, together with a pharmaceutically acceptable carrier, diluent, or excipient. Suitably, the MRCA is defined at node 52630 of the bac120 phylogenetic tree from r95 of the Genome Taxonomy Database (GTDB). In some embodiments, the phylogenetic tree is created by release 95 of the GTDB, however, any suitable subsequent release is considered to give equally as applicable results. In some preferred embodiments of this type, the bacterial strain is of M. faecis. In some alternative embodiments, the bacterial strain is of M. lactaris.

[0020] Typically, the bacterial strain is at least partially isolated.

[0021] In some embodiments, the bacterial strain is live. In some alternative embodiments, the bacterial strain is dead.

[0022] In some embodiments, the compositions further comprise a prebiotic.

[0023] In some embodiments, the composition is formulated in a dried form. Typically, the composition is dried using techniques selected from lyophilization, spray drying, fluidized bed drying, vacuum drying, or a combination thereof.

[0024] In some embodiments, the composition is formulated for oral administration.

[0025] In some embodiments, the bacterial strain produces an agent that attenuates or impairs signal transducer and activator of transcription 3 (STAT3) signalling in a cell.

[0026] In some embodiments of this type, the agent is a small molecule, peptide, or nucleotide. Typically, the agent is released by the bacterial strain.

[0027] In some embodiments, the agent binds specifically to any one of STAT3, JAK2, TYK, or IL-23.

[0028] In some embodiments, the M. faecis strain produces one or more metabolites selected from the group comprising or consisting of propionate, lactate, acetate, and formate. In some of the same embodiments and some other embodiments, the M. faecis strain does not produce butyrate.

[0029] In some embodiments, the M. faecis strain produces vitamin B12.

[0030] In another aspect, the present invention provides a method of restoring or improving gut barrier function in a subject, the method comprising administering to the subject a bacterial strain of the species Mediterraneibacter faecis, to thereby restore or improve gut barrier function.

[0031] In some preferred embodiments, restoring or improving gut barrier function is characterised by at least one of: (i) an increase in the quality and/or quantity of mucin; (ii) improvement in integrity of tight junction proteins; (iii) reduction in translocation of luminal contents into systemic circulation; or (iv) reduction of intestinal ulcers and/or intestinal wounds.

[0032] In some embodiments, the luminal contents includes lipopolysaccharide (LPS).

[0033] In some embodiments, the restoration or improvement in gut barrier function results in a reduction in systemic inflammation in the subject. In some embodiments of this type, the systemic inflammation is characterized by elevated levels of an inflammatory cytokine (e.g., IL-1β IL-8, IL-6, and TNF) in the subject as compared to the level of the inflammatory cytokine in a healthy subject.

[0034] In yet another aspect, the present invention provides a method of maintaining gut barrier function in a subject, the method comprising administering to the subject a bacterial strain of the species Mediterraneibacter faecis, to thereby maintain gut barrier function in the subject.

[0035] In yet another aspect, the present invention provides a method of reducing inflammation in a subject, the method comprising administering to the subject a bacterial strain of the strain Mediterraneibacter faecis, to thereby reduce inflammation in the subject.

[0036] In some embodiments, the inflammation is local to the gut environment, or systemic inflammation.

[0037] In another aspect, the present invention provides a method of inducing or enhancing mucosal healing in a subject, the method comprising administering to the subject a bacterial strain of the species Mediterraneibacter faecis in an amount sufficient to induce epithelial cell migration, proliferation and/or differentiation, to thereby induce mucosal healing in the subject.

[0038] In some embodiments, mucosal healing in the subject can be measured using one or more fecal or serum markers. By way of an illustrative example, one or more fecal markers may be selected from the group comprising calprotectin, lactoferrin, metalloproteinase (MMP)-9, and lipocalin-2.

[0039] In some embodiments, the bacterial strain reduces inflammation by attenuating the NFκB pathway. In some embodiments of this type, the bacterial strain inhibits the production of one or more transcription factors, cytokines, or chemokines selected from the group comprising NFκB, TNF, IFN-γ, IL-1β, IL-8, and MCP-1.

[0040] In yet another aspect, the present invention provides methods of blocking or otherwise inhibiting STAT3 signalling in a target cell, the method comprising contacting the cell with at least a soluble component of a bacterial cell preparation of the species Mediterraneibacter faecis, to block or otherwise inhibit STAT3 signalling in the cell. Typically, the method of this aspect is performed in vitro.

[0041] In some embodiments, the target cell is selected from a reporter cell (e.g., a HEK cell), an immune cell (e.g., a Th17 immune cell), an epithelial cell, or an endothelial cell. In some embodiments, the target cell is a mammalian cell, and preferably, a human cell.

[0042] In some embodiments, the bacterial cell preparation is a bacterial cell culture. The soluble component may therefore comprise, consist, or consist essentially of, the soluble fraction of the bacterial cell culture (e.g., the cell culture supernatant). The soluble component may further comprise some insoluble components of the bacterial cell culture. For example, the soluble component may include substantially all of the bacterial culture. Preferably, the soluble component is substantially depleted of bacterial cells.

[0043] In some alternative embodiments, the bacterial cell preparation is a bacterial cell lysate. In exemplary embodiments of this type, the soluble component may relate to the soluble fraction of the cell lysate. A soluble fraction can suitably be achieved by any method, including by centrifugation.

[0044] In still yet another aspect, the present invention provides a method of blocking or otherwise inhibiting STAT3 signalling in a cell, the method comprising administering a bacterial strain of the species Mediterraneibacter faecis to the subject, thereby blocking or otherwise inhibiting STAT3 signalling in the cell. Typically, the methods of this aspect are performed in vivo.

[0045] In some embodiments, the cell is an immune cell (e.g., a Th17 immune cell) or epithelial cell.

[0046] In some embodiments, the cell is an epithelial cell, and the bacterial strain or a metabolite produced by the bacterial strain increases the production of IL-22 in the subject.

[0047] In some embodiments, the bacterial strain produces a molecule that is a direct inhibitor or an indirect inhibitor of STAT3. For example, the bacterial strain may produce a metabolite that directly inhibits at least one of an IL-23 polypeptide, a JAK2 polypeptide, a TYK2 polypeptide, or a STAT3 polypeptide.

[0048] In some embodiments, the bacterial strains used in the methods described above and elsewhere herein produce one or more metabolites selected from propionate, lactate, acetate, and formate. In some of the same embodiments, and some alternative embodiments, the bacterial strain produces vitamin B12. In some embodiments, the bacterial strain does not produce butyrate.

[0049] In some embodiments the bacterial strain has a 16S rRNA sequence that is at least about 97.5%, 98.5%, 99%, 99.1%, 99.2%, 99.3%, 99.4%, 99.5%, 99.6%, 99.7%, 99.8%, or 99.9% identical to the 16S rRNA sequence of a bacterial strain of M. faecis.

[0050] In some alternative embodiments, the bacterial strain has a 16S rRNA sequence that is at least about 97.5%, 98.5%, 99%, 99.1%, 99.2%, 99.3%, 99.4%, 99.5%, 99.6%, 99.7%, 99.8%, or 99.9% identical to any one of SEQ ID NOs: 1-24, or when the bacterial strain has the 16S rRNA gene sequence represented by any one of SEQ ID NOs: 1-24. In some embodiments, the bacterial strain comprises two or more copies (for example, two copies, three copies, four copies, five copies, six copies, seven copies, eight copies) of a 16S rRNA sequence independently selected from the 16S rRNA sequences set forth in SEQ ID NO: 1-24.

[0051] In some embodiments the bacterial strain has a 16S rRNA sequence that is at least about 97.5%, 98.5%, 99%, 99.1%, 99.2%, 99.3%, 99.4%, 99.5%, 99.6%, 99.7%, 99.8%, or 99.9% identical to the 16S rRNA sequence of a bacterial strain of M. lactaris.

[0052] In some alternative embodiments, the bacterial strain has a 16S rRNA sequence that is at least about 97.5%, 98.5%, 99%, 99.1%, 99.2%, 99.3%, 99.4%, 99.5%, 99.6%, 99.7%, 99.8%, or 99.9% identical to any one or more of SEQ ID NOs: 29-32, or when the bacterial strain has the 16S rRNA gene sequence represented by any one or more of SEQ ID NOs: 29-32.

[0053] In some embodiments, the bacterial strain is the M. faecis strain deposited under any one of accession numbers V21/006223, V21/006224, V21/006225, or V21/006226, or a derivative thereof.

[0054] Preferably, the bacterial strain is at least partially isolated.

[0055] In some embodiments, the bacterial strain is formulated as a pharmaceutical composition, further comprising a pharmaceutically acceptable carrier, diluent or excipient. In some embodiments, the pharmaceutical composition is a dry composition. In some embodiments, the dry composition is selected from the group consisting of particles, granules, and powder. By way of an illustrative example the pharmaceutical composition may be lyophilized, spray dried, fluidized bed dried, vacuum dried, or a combination thereof.

[0056] In some embodiments, the pharmaceutical composition is formulated for oral administration.

[0057] In still yet other aspects, the present invention provides a method of treating an inflammatory or autoimmune disorder in a subject, the method comprising administering an effective amount of a bacterial strain of Mediterraneibacter faecis to the subject, to thereby treat or prevent the inflammatory or autoimmune disorder.

[0058] In some embodiments, the inflammatory or autoimmune disorder is selected from the group comprising an inflammatory bowel disease (such as Crohn's disease or ulcerative colitis); asthma (such as allergic asthma or neutrophilic asthma); arthritis (such as rheumatoid arthritis, osteoarthritis, psoriatic arthritis, or juvenile idiopathic arthritis); fatty liver disease (such as nonalcoholic fatty liver disease (NAFLD)); ankylosing spondylitis; psoriasis; systemic lupus erythematosus (SLE); scleroderma; Sjogren's syndrome; vasculitis; type 1 diabetes mellitus. Preferably, the inflammatory or autoimmune disorder is an inflammatory bowel disease (IBD).

[0059] In some embodiments, the bacterial strain blocks or otherwise inhibits STAT3 signalling in at least a cell of the subject. Typically, the cell is an epithelial cell, endothelial cell or an immune cell (e.g., a Th17 immune cell).

[0060] In some embodiments, the bacterial strain produces one or more metabolites selected from the group comprising propionate, lactate, acetate, and formate. In some of the same embodiments, and some other embodiments, the bacterial strain does not produce butyrate.

[0061] In some embodiments, the bacterial strain produces vitamin B12.

[0062] In some embodiments, the bacterial strain has a 16S rRNA sequence that is at least about 95%, 96%, 97%, 98%, 99%, 99.5% or 99.9% identical to the 16S rRNA sequence of a bacterial strain of the genus Mediterraneibacter.

[0063] Alternatively, in some embodiments the bacterial strain has a 16S rRNA sequence that is at least about 95%, 96%, 97%, 98%, 99%, 99.5% or 99.9% identical to SEQ ID NO: 1-24, or when the bacterial strain has the 16S rRNA sequence represented by any one of SEQ ID NOs: 1-24.

[0064] Alternatively, in some embodiments the bacterial strain has a 16S rRNA sequence that is at least about 95%, 96%, 97%, 98%, 99%, 99.5% or 99.9% identical to any one or more of SEQ ID NOs: 29-32, or when the bacterial strain has the 16S rRNA sequence represented by any one or more of SEQ ID NOs: 29-32.

[0065] Preferably, the bacterial strain is at least partially isolated.

[0066] In some embodiments, the bacterial strain is formulated as a pharmaceutical composition, together with a pharmaceutically acceptable carrier, diluent, and/or excipient. In some embodiments, the composition is a dry composition selected from the group consisting of particles, granules, and powder. For example, the composition may be lyophilized. Alternatively, the composition may be spray dried, fluidized bed dried, or vacuum dried.

[0067] In some embodiments, the composition is formulated for oral administration.

[0068] In one aspect, the present invention provides a composition comprising a bacterial strain of the genus Mediterraneibacter for use in therapy.

[0069] In another aspect, the present invention provides a composition comprising a bacterial strain of Mediterraneibacter faecis, for use in therapy.

[0070] In another aspect, the present invention provides a composition comprising a bacterial strain of Mediterraneibacter lactaris for use in therapy.

[0071] In yet another aspect, the present invention provides a composition comprising a bacterial strain of the genus Mediterraneibacter, for use in the treatment or prevention of an inflammatory or autoimmune disorder.

[0072] In still yet another aspect, the present invention provides a composition comprising a bacterial strain of Mediterraneibacter faecis, for use in the treatment or prevention of an inflammatory or autoimmune disorder.

[0073] In some embodiments, the bacterial strain is the M. faecis strain deposited under any one of accession numbers V21/006223, V21/006224, V21/006225, or V21/006226, or a derivative thereof.

[0074] In a related aspect, the present invention provides a composition comprising a bacterial strain of Mediterraneibacter lactaris, for use in the treatment or prevention of an inflammatory or autoimmune disorder.

[0075] In some embodiments, the inflammatory or autoimmune disorder is selected from an inflammatory bowel disease (such as Crohn's disease or ulcerative colitis); asthma (such as allergic asthma or neutrophilic asthma); arthritis (such as rheumatoid arthritis, osteoarthritis, psoriatic arthritis, or juvenile idiopathic arthritis); fatty liver disease (such as nonalcoholic fatty liver disease (NAFLD)); ankylosing spondylitis; psoriasis; systemic lupus erythematosus (SLE); scleroderma; Sjogren's syndrome; vasculitis; type 1 diabetes mellitus. In some preferred embodiments, the inflammatory or autoimmune disorder is an inflammatory bowel disease (IBD).

[0076] In one aspect, the present invention provides a composition for use in treating an inflammatory or autoimmune disorder, the composition comprising a bacterial strain of Mediterraneibacter faecis; and an anti-inflammatory agent.

[0077] In some embodiments, the anti-inflammatory agent is selected from the group comprising 5-aminosalicylates, corticosteroids, azathioprine, infliximab, and adalimumab.

[0078] In another aspect, the present invention provides a composition for use in treating an inflammatory or autoimmune disorder, the composition comprises a bacterial strain of Mediterraneibacter faecis; and a nutritional supplement. In embodiments of this type, the nutritional supplement improves engraftment of the bacterial stain.

[0079] In some related aspects, the technology described herein provides bacterial species and compositions comprising them in for form of probiotics. Preferably, such probiotics are effective to improve intestinal microbial ecology, alleviate symptoms of microbial dysbiosis, promote wellness, and/or treat or prevent inflammatory and/or autoimmune disorders.

### BRIEF DESCRIPTION OF THE FIGURES

[0080] The following figures form part of the present specification and are included to further demonstrate certain aspects of the present disclosure. The disclosure may be better understood by reference to one or more of these figures in combination with the detailed description of specific embodiments presented herein.

[0081] FIG. 1 provides a graphical phylogenetic tree that displays a focused view of node 52630 of the bac120 phylogenetic tree from the GTDB. The GTDB tree is a genome tree constructed from a concatenated alignment of 120 conserved single-copy bacterial marker genes (Parks et al. 2018). The Most Recent Common Ancestor (MRCA) of M. lactaris and M. faecis (node 52630) is highlighted.

[0082] FIG. 2 provides a graphical representation of bacterial strain associations with a broad range of inflammatory and autoimmune disorders. Using high resolution gut metagenomic data of 6,020 subjects, we identified (A) M. faecis and (B) M. lactaris as being prevalent in healthy humans (dark bar) but depleted in a range of medical conditions (striped bars). All shown association have a FDR <0.01 (Fisher's exact test).

[0083] FIG. 3 provides graphical representation of the phylogeny, metabolism, and morphology of M. faecis strains. (A) A genome tree constructed with an alignment of 120 bacteria-specific single copy marker genes from high quality reference genomes from the GTDB (release 95). Non-parametric bootstrap values calculated from 1000 iterations. (B) Gram-staining of MH-23 isolate MH23-1 showing morphology.

[0084] FIG. 4 provides graphical representations of the effect of M. faecis on naïve animals. (A) Overview of the model used to assess the effect of M. faecis MH23-1 on naïve C57Bl/6 mice. (B) Treatment with M. faecis MH23-1 has little effect on body weight of naïve animals. (C)-(D) Treatment with M. faecis MH23-1 has no effect on colon length or colon weight/length ratio relative to vehicle treated controls in naïve animals. (E)-(G) Treatment with M. faecis MH23-1 has no effect on epithelial injury, inflammation or hypervascularization relative to vehicle treated controls in naïve animals. (H) Treatment with M. faecis MH23-1 has no effect on gut histology relative to vehicle treated controls in naïve animals. All data reported as mean and standard deviation. ns, not significant; * p<0.05.

[0085] FIG. 5 provides graphical representations that M. faecis MH23-1 restores gut barrier function. (A) Overview of the DSS model used to assess the therapeutic efficacy of M. faecis MH23-1. (B) Effect of daily treatment of vehicle, prednisone, F. prausnitzii A2-165 and M. faecis in health and DSS treated samples. All treatment groups were compared to the DSS+vehicle group. Significance was determined using a two-way Anova with Dunnett's test for multiple comparison. (C) Endoscopic assessment of colitis as assessed on days 1, 2 and 6. All groups were compared to the DSS+vehicle group for each individual day using a Kruskal-Wallis test with Dunn's correction for multiple comparisons (day 1) or one-way Anova with Dunnett's correction for multiple comparison (day 2, 6) as appropriate. All data presented as mean and standard deviation. (D) Representative gut histology images of C57Bl/6 mice treated with vehicle, prednisone, or M. faecis MH23-1. (E) DSS treatment results in an increase in the histopathological score that is ameliorated by treatment with prednisone F. prausnitzii A2-165 and M. faecis MH23-1. All data presented as mean and standard deviation. All groups were compared to the DSS+vehicle group and significance was determined using a one-way Anova with Dunnett's test for multiple comparison. (F) DSS treatment results in an increase in epithelial injury that is ameliorated by treatment with prednisone or M. faecis MH23-1. All data presented as mean and standard deviation. All groups were compared to the DSS+vehicle group using a Kruskal-Wallis test with Dunn's correction for multiple comparisons. (G) DSS treatment results in an increase in inflammation score that is ameliorated by treatment with prednisone or M. faecis MH23-1. All data presented as mean and standard deviation. All groups were compared to the DSS+vehicle group using a one-way Anova with Dunnett's correction for multiple comparisons. (H) Lipocalin-2 concentration in faeces of C57Bl/6 mice treated with vehicle, prednisone, F. prausnitzii or M. faecis MH23-1. Significance was determined using a one-way Anova with Dunnett's test for multiple comparison. (I) DSS treatment results in a significant decrease in the number of goblet cells relative to enterocytes and this is ameliorated by treatment with M. faecis MH23-1. All data presented as mean and standard deviation. All groups were compared to the DSS+vehicle group using a Kruskal-Wallis test with Dunnett's correction for multiple comparisons. (J) DSS treatment results in a significant decrease in the ratio of alcian blue staining that is ameliorated by treatment with M. faecis MH23-1 but not prednisone nor F. prausnitzii A2-165. All data presented as mean and standard deviation. All groups were compared to the DSS+vehicle group using Brown-Forsythe and Welch ANOVA tests with Dunnett's T3 correction for multiple comparisons. (ns: not significant; *, p<0.05; **, p<0.01; ****, p<0.0001). (K) Overview of the DSS model used to assess the therapeutic efficacy of M. faecis MH23-3. (L) Endoscopic assessment of colitis with all groups compared to the DSS+vehicle group. All data presented as mean and standard deviation. (M) DSS treatment results in an increase in the histopathological score that is ameliorated by treatment with prednisone and M. faecis MH23-3. All data presented as mean and standard deviation and all groups were compared to the DSS+vehicle group. (N) DSS treatment results in an increase in epithelial injury that is ameliorated by treatment with prednisone or M. faecis MH23-3. All data presented as mean and standard deviation and all groups were compared to the DSS+vehicle group. (0) DSS treatment results in an increase in inflammation score that is ameliorated by treatment with prednisone or MH23-3. All data presented as mean and standard deviation and all groups were compared to the DSS+vehicle group (P) Lipocalin-2 concentration in faeces of C57Bl/6 mice±DSS treated with vehicle, prednisone or M. faecis MH23-3. All data presented as mean and standard deviation and all groups were compared to the DSS+vehicle group. (Q) Overview of the TNBS model used to assess the therapeutic efficacy of M. faecis MH23-3. (R) DSS treatment results in an increase in the histopathological score that is ameliorated by treatment with prednisone and M. faecis MH23-3. All data presented as mean and standard deviation and all groups were compared to the DSS+vehicle group. (S) Representative gut histology images of C57Bl/6 mice±TNBS treated with vehicle, prednisone, or M. faecis MH23-1. (ns: not significant; *, p<0.05; **, p<0.01; ***, p<0.001; ****, p<0.0001).

[0086] FIG. 6 provides a graphical representation of M. faecis suppressing STAT3 and NF-kB activation in vitro. (A)-(C) STAT3 signalling is inhibited when HEKBlue IL-23 reporter cell lines are treated with cell-free supernatant of M. faecis MH23-1, MH23-3 and MH23-4 (t-test, n=3, (A) p<0.0001; (B) p<0.0001; (C) p=0.002). (D)-(F) Cell-free supernatant of M. faecis strains MH23-1, MH23-3 and MH23-4 were size fractionated. The <3 KDa fractions where heat treated at 37° C. or 97° C. then tested HEKBlue IL-23 reporter cell lines. After heat treatment, all fractions are still able to inhibit STAT3 signalling (t-test, n=6; (D) p=0.0068, p=0.0186, p=0.0005; (E) p=0.0008, p=0.0021, p=0.0002; (F) p<0.0001, p<0.0001, p<0.0001).

[0087] FIG. 7 provides a graphical representation of cytokine expression in guyt epithelial cells. (A) M. faecis MH23-1 culture supernatant suppresses IL-1p mediated IL-8 secretion in HCT116 gut epithelial cells. (B) After PMA-dependent maturation of THP-1 into active macrophages, M. faecis MH23-4 and MR1 supernatant reduce the level of (A) IL-8 and (B) TNF production when co-stimulated with LPS. Accordingly, TNF levels increase when the cells are treated with a bacteria associated to IBD such as C. bolteae (ANOVA test, n=3; p=0.0026). All data presented as mean and standard deviation.

[0088] FIG. 8 shows heatmaps of GPCR hits of MH23. Heatmaps of agonist (blue) and antagonist (green) hits for M. faecis MH23-1. Legend on the right side indicate the percentage of activation for each hit.

[0089] FIG. 9 provides a graphical representation of M. faecis modulates IL-22 and IFNγ in hPBMC-derived CD3⁺ and CD3⁻ cells. (A) M. faecis MH23-1 and MH23-2 cell-free supernatant treatment induces an increase of T cells only in unstimulated PBMC (ANOVA test, n=6, Untreated p=0.0010, +PIM p=0.0937). (B)-(C) M. faecis MH23-1 and MH23-2 cell-free supernatant treatment does not induce an increase of NK cells (B) ANOVA test, n=6; untreated p=0.0396; +PIM p=0.0275), or a reduction of dendritic cells (C) ANOVA test, n=6; Untreated p=0.1994; +PIM p=0.3827). (D)-(F) CD3⁻ and CD3⁺ cells dramatically reduce the expression of IFNγ when treated with cell-free supernatant of M. faecis MH23-1 and MH23-2. CD3⁻ cells also showed an increase of IL-22 expression when treated with cell-free supernatant of M. faecis MH23-1 and MH23-2 (ANOVA test, n=7, (D) p<0.0001, (E) p<0.0001, (F) p=0.0189).

[0090] FIG. 10 provides a graphical representation showing M. faecis promotes the migration of human gut epithelial cells. (A) Transwell migration assays were employed to study the effect of sterile culture supernatant extracts from M. faecis strains MH23-1 and MH23-2 on the migration of HCT116 colon cancer cells. In serum-starved conditions (0.5% FBS), untreated HCT116 cells and cells treated with Ty medium extract showed comparable background level of migration to the basolateral side of the Transwell chamber. The addition of M. faecis extract to the bottom of the chamber significantly increased the movement of HCT116 cells to the basolateral side compared to the Ty control (Ty, C n=6 technical replicates; MH23-1, MH23-1 n=4 technical replicates, for 3 biological replicates each; Dunnett's multiple comparisons test ** P=0.0035, **** P<0.0001). (B) Representative brightfield images at 10× magnification for Transwell migration experiments. Image size is 703.5 μm×572.5 μm. (C) As a second readout for cell migration, the Incucyte scratch wound assay was performed. The relative wound confluence was measured every two hours after the HCT116 cell monolayer was scratched. 24 hours post scratch, serum-starved HCT116 cells incubated in 0.3× extract from M. faecis strains MH23-1 and MH23-2 showed significantly higher wound confluence, compared to cells treated with Ty medium extract. (Ty, C n=27 technical replicates; MH23-1, MH23-1 n=18 technical replicates, for 3 biological replicates each; Dunnett's multiple comparisons test * p=0.0142, ** p<0.0088). (D) Representative images (10× magnification) of scratch wound migration experiments captured at starting point (0 hours), and 24 as well as 48 hours after the cell monolayer was scratched. Scale bars: 400 μm.

[0091] FIG. 11 provides graphical representations of the anti-STAT3 activation activity of M. lactaris. (A) M. lactaris ATCC 29176 cell free culture supernatant and the <3 kDa fraction suppresses STAT3 activation. (B) M. lactaris MH54 cell free culture supernatant and the <3 kDa fraction suppresses STAT3 activation. Samples were compared using an unpaired t-test. p<<0.05, p<0.01, p<0.0001.

[0092] FIG. 12 provides graphical representations of the effect of M faecis on barrier integrity. (A) M. faecis MH23-1 and MH23-3 cell free culture supernatant ameloriate IFN-γ induced changes to barrier integrity following 24 hours of treatment relative to the TY medium control as assessed by TEER. (B) M. faecis MH23-1 and MH23-3 cell free culture supernatant ameloriate IFN-γ induced changes to barrier integrity in TEER following 144 hours of treatment relative to the TY medium control as assessed by TEER. (C) M. faecis MH23-3 culture supernatant extract promotes restoration of barrier integrity following IFN-γ treatment relative to the YG/V medium control. Samples were compared using an unpaired t-test. *, p<0.05; **, p<0.01; *** p<0.001: **** p<0.0001.

### BRIEF DESCRIPTION OF THE SEQUENCES

| SEQ ID | |
|---|---|
| NO: | Sequence Description |
| 1 | 16S rRNA sequence of M. faecis strain MH23-1 copy 1 |
| 2 | 16S rRNA sequence of M. faecis strain MH23-1 copy 2 |
| 3 | 16S rRNA sequence of M. faecis strain MH23-1 copy 3 |
| 4 | 16S rRNA sequence of M. faecis strain MH23-1 copy 4 |
| 5 | 16S rRNA sequence of M. faecis strain MH23-1 copy 5 |
| 6 | 16S rRNA sequence of M. faecis strain MH23-1 copy 6 |
| 7 | 16S rRNA sequence of M. faecis strain MH23-2 copy 1 |
| 8 | 16S rRNA sequence of M. faecis strain MH23-2 copy 2 |
| 9 | 16S rRNA sequence of M. faecis strain MH23-2 copy 3 |
| 10 | 16S rRNA sequence of M. faecis strain MH23-2 copy 4 |
| 11 | 16S rRNA sequence of M. faecis strain MH23-2 copy 5 |
| 12 | 16S rRNA sequence of M. faecis strain MH23-2 copy 6 |
| 13 | 16S rRNA sequence of M. faecis strain MH23-3 copy 1 |
| 14 | 16S rRNA sequence of M. faecis strain MH23-3 copy 2 |
| 15 | 16S rRNA sequence of M. faecis strain MH23-3 copy 3 |
| 16 | 16S rRNA sequence of M. faecis strain MH23-3 copy 4 |
| 17 | 16S rRNA sequence of M. faecis strain MH23-3 copy 5 |
| 18 | 16S rRNA sequence of M. faecis strain MH23-3 copy 6 |
| 19 | 16S rRNA sequence of M. faecis strain MH23-4 copy 1 |
| 20 | 16S rRNA sequence of M. faecis strain MH23-4 copy 2 |
| 21 | 16S rRNA sequence of M. faecis strain MH23-4 copy 3 |
| 22 | 16S rRNA sequence of M. faecis strain MH23-4 copy 4 |
| 23 | 16S rRNA sequence of M. faecis strain MH23-4 copy 5 |
| 24 | 16S rRNA sequence of M. faecis strain MH23-4 copy 6 |
| 25 | Partial genome sequence of M. faecis strain MH23-1 |
| 26 | Partial genome sequence of M. faecis strain MH23-2 |
| 27 | Partial genome sequence of M. faecis strain MH23-3 |
| 28 | Partial genome sequence of M. faecis strain MH23-4 |
| 29 | Partial 16S rRNA sequence of M. lactaris strain MH54 1 |
| 30 | Partial 16S rRNA sequence of M. lactaris strain MH54 2 |
| 31 | Partial 16S rRNA sequence of M. lactaris strain MH54 3 |
| 32 | Partial 16S rRNA sequence of M. lactaris strain MH54 4 |
| 33 | Partial genome sequence of M. lactaris strain MH54 |
| 34 | Partial genome sequence of M. lactaris strain MH54 |
| 35 | Partial genome sequence of M. lactaris strain MH54 |
| 36 | Partial genome sequence of M. lactaris strain MH54 |
| 37 | Partial genome sequence of M. lactaris strain MH54 |
| 38 | Partial genome sequence of M. lactaris strain MH54 |

### DETAILED DESCRIPTION OF THE INVENTION

### 1. Definitions

[0094] Unless defined otherwise, all technical and scientific terms used herein have the same meaning as commonly understood by those of ordinary skill in the art to which the invention belongs. Although any methods and materials similar or equivalent to those described herein can be used in the practice or testing of the present invention, preferred methods and materials are described. For the purposes of the present invention, the following terms are defined below.

[0095] The articles “a” and “an” are used herein to refer to one or to more than one (i.e. to at least one) of the grammatical object of the article. By way of example, “an element” means one element or more than one element.

[0096] The term “about” as used herein refers to the usual error range for the respective value readily known to the skilled person in this technical field. Reference to “about” a value or parameter herein includes (and describes) embodiments that are directed to that value or parameter per se.

[0097] As used herein, the term “administering,” refers to the placement of an agent (e.g., bacteria) as disclosed herein into a subject by a method or route which results in at least partial delivery of the agent at the desired site. Compositions comprising the compounds disclosed herein can be administered by any appropriate route which results in an effective biological activity or therapeutic effect in the subject. In some embodiments, administration comprises physical human activity (e.g., an injection, act of ingestion, an act of application, and/or manipulation of a delivery device or machine). Such activity can be performed (e.g., by a medical professional and/or the subject being treated).

[0098] Specifically, as used herein “administer” and “administration” encompasses embodiments in which one person directs another to consume live bacteria, dead bacteria, spent mediums derived from a bacteria, cell pellets of a bacteria, purified matabolites produced by a bacteria, purified proteins produced by a bacteria, prebiotics, small molecules, or combinations thereof in a certain manner and/or for a certain purpose independently of or in variance to any instructions received from a second person. Non-limiting examples of embodiments include the situation in which one person directs another to consume live bacteria, dead bacteria, spent mediums derived from a bacteria, cell pellets of a bacteria, purified matabolites produced by a bacteria, purified proteins produced by a bacteria, prebiotics, small molecules, or combinations thereof in a certain manner and/or for a certain purpose include when a physician prescribes a course of conduct and/or treatment to a patient, when a parent commands a minor user (such as a child) to consume such a product, when a trainer advises a user (such as an athlete) to follow a particular course of conduct and/or treatment, or when a manufacturer, distributer, or marketer recommends conditions of use to an end user, for example through advertisements or labeling on packing or on other materials provided in association with the sale or marketing of a product. In some embodiments, the disclosed compositions can be administered orally, intravenously, intramuscularly, intrathecally, subcutaneously, sublingually, buccally, rectally, vainally, by the ocular route, by the optic route, nasally, via inhalation, by nebulization, cutaneously, transdermally, or combinations thereof, and formulated for delivery with a pharmaceutically acceptable excipient, carrier or diluent. Of note, although the disclosed compositions encompass multiple formulations and modes of delivery for treatments to ameliorate dysbiosis and its sequelae, it should be noted that live biotherapeutic products such as probiotics are not typically administered intravenously, intramuscularly, or intraperitoneally. These modes of delivery would likely be reserved for small-molecule products of bacterial metabolism.

[0099] The terms “administration concurrently” or “administering concurrently” or “co-administering” and the like refer to the administration of a single composition containing two or more actives, or the administration of each active as separate compositions and/or delivered by separate routes either contemporaneously or simultaneously or sequentially within a short enough period of time that the effective result is equivalent to that obtained when all such actives are administered as a single composition. By “simultaneously” is meant that the active agents are administered at substantially the same time, and desirably together in the same formulation. By “contemporaneously” it is meant that the active agents are administered closely in time, e.g., one agent is administered within from about one minute to within about one day before or after another. Any contemporaneous time is useful. However, it will often be the case that when not administered simultaneously, the agents will be administered within about one minute to within about eight hours and suitably within less than about one to about four hours. When administered contemporaneously, the agents are suitably administered at the same site on the subject. The term “same site” includes the exact location, but can be within about 0.5 to about 15 centimeters, preferably from within about 0.5 to about 5 centimeters. The term “separately” as used herein means that the agents are administered at an interval, for example at an interval of about a day to several weeks or months. The active agents may be administered in either order. The term “sequentially” as used herein means that the agents are administered in sequence, for example at an interval or intervals of minutes, hours, days or weeks. If appropriate the active agents may be administered in a regular repeating cycle.

[0100] The term “agent” includes a compound that induces a desired pharmacological and/or physiological effect. The term also encompass pharmaceutically acceptable and pharmacologically active ingredients of those compounds specifically mentioned herein including but not limited to salts, esters, amides, prodrugs, active metabolites, analogs and the like. When the above term is used, then it is to be understood that this includes the active agent per se as well as pharmaceutically acceptable, pharmacologically active salts, esters, amides, prodrugs, metabolites, analogs, etc. The term “agent” is not to be construed narrowly but extends to small molecules, proteinaceous molecules such as peptides, polypeptides and proteins as well as compositions comprising them and genetic molecules such as RNA, DNA and mimetics and chemical analogs thereof as well as cellular agents. The term “agent” includes a cell that is capable of producing and secreting a polypeptide referred to herein as well as a polynucleotide comprising a nucleotide sequence that encodes that polypeptide. Thus, the term “agent” extends to nucleic acid constructs including vectors such as viral or non-viral vectors, expression vectors and plasmids for expression in and secretion in a range of cells.

[0101] The “amount” or “level” of a biomarker is a detectable level in a sample. These can be measured by methods known to one skilled in the art and also disclosed herein. The expression level or amount of biomarker assessed can be used to determine the response to treatment.

[0102] As used herein, “and/or” refers to and encompasses any and all possible combinations of one or more of the associated listed items, as well as the lack of combinations when interpreted in the alternative (or).

[0103] The term “anaerobic” means not requiring oxygen for growth. Anaerobic bacterial strains comprise bacterial strains that are obligate anaerobes (i.e., those that are harmed by the presence of oxygen); aerotolerant anaerobes, (i.e., those that cannot use oxygen for growth, but tolerate its presence); and facultative anaerobes (i.e., those that can grow without oxygen, but will use oxygen if it is present).

[0104] “Anaerobic conditions” are defined as conditions under which the oxygen concentration in the fermentation medium is too low for the microorganism to use as a terminal electron acceptor. “Anaerobic conditions” can be further defined as conditions under which no or small amounts of oxygen are added to the medium at rates of <3 mmol/L/h, preferably <2.5 mmol/L/h, more preferably <2 mmol/L/h, and most preferably <1.5 mmol/L/h. “Anaerobic conditions” means in particular completely oxygen-free (=0 mmol/L/h oxygen) or with small amounts of oxygen added to the medium at rates of e.g., <0.5 to <1 mmol/L/h. “Anaerobic metabolism” refers to a biochemical process in which oxygen is not the final acceptor of electrons contained in NADH. Anaerobic metabolism can be divided into anaerobic respiration, in which compounds other than oxygen serve as the terminal electron acceptor, and substrate level phosphorylation, in which the electrons from NADH are utilized to generate a reduced product via a fermentative pathway.

[0105] The term “carbon source” generally refers to a substrate or compound suitable for sustaining microorganism growth. Carbon sources may be in various forms, including, but not limited to polymers, carbohydrates, alcohols, acids, aldehydes, ketones, amino acids, peptides, etc. For example, these may include monosaccharides (such as glucose, fructose, xylose), oligosaccharides (i.e., sucrose, lactose), polysaccharides (i.e., starch, cellulose, hemicellulose), lignocellulosic materials, fatty acids (i.e., succinate, lactate, acetate), glycerol, etc. or a mixture thereof. The carbon source may be a product of photosynthesis, such as glucose or cellulose.

[0106] Monosaccharides used as carbon sources may be the product of hydrolysis of polysaccharides, such as acid or enzymatic hydrolysates of cellulose, starch and pectin. The term “energy source” may be used here interchangeably with carbon source since in chemoorganotrophic metabolism the carbon source is used both as an electron donor during catabolism and as a carbon source during cell growth.

[0107] The term “cocci” means having a cellular shape that approximates to spherical, ovoid, or substantially round shape (e.g., when examined under a light microscope). This shape is similar to that of bacterial strains of the genus Staphylococci or Streptococci (e.g., when examined under a light microscope). The characteristic shape of a bacterial strain (such as “cocci”) is a commonly used classification criterion in the field of microbiology.”

[0108] Throughout this specification, unless the context requires otherwise, the words “comprise”, “comprises” and “comprising” will be understood to imply the inclusion of a stated step or element or group of steps or elements but not the exclusion of any other step or element or group of steps or elements. Thus, use of the term “comprising” and the like indicates that the listed elements are required or mandatory, but that other elements are optional and may or may not be present. By “consisting of” is meant including, and limited to, whatever follows the phrase “consisting of”. Thus, the phrase “consisting of” indicates that the listed elements are required or mandatory, and that no other elements may be present. By “consisting essentially of” is meant including any elements listed after the phrase, and limited to other elements that do not interfere with or contribute to the activity or action specified in the disclosure for the listed elements. Thus, the phrase “consisting essentially of” indicates that the listed elements are required or mandatory, but that other elements are optional and may or may not be present depending upon whether or not they affect the activity or action of the listed elements.

[0109] As used herein, “culturing”, “culture” and the like refer to the set of procedures used in vitro where a population of cells (or a single cell) is incubated under conditions which have been shown to support the growth or maintenance of the cells in vitro. The art recognizes a wide number of formats, media, temperature ranges, gas concentrations etc. which need to be defined in a culture system. The parameters will vary based on the format selected and the specific needs of the individual who practices the methods herein disclosed. However, it is recognized that the determination of culture parameters is routine in nature.

[0110] The terms “decrease”, “reduced”, “reduction”, “inhibit”, “suppress”, “attenuate” and the like are all used herein to mean a decrease by a statistically significant amount. In some embodiments, these terms typically mean a decrease by at least 10% as compared to a reference level (e.g., the absence of a given treatment or agent) and can include, for example, a decrease by at least about 10%, at least about 20%, at least about 25%, at least about 30%, at least about 35%, at least about 40%, at least about 45%, at least about 50%, at least about 55%, at least about 60%, at least about 65%, at least about 70%, at least about 75%, at least about 80%, at least about 85%, at least about 90%, at least about 95%, at least about 98%, at least about 99%, or more. As used herein “reduction”, “suppression”, and “inhibition” does not necessitate a complete inhibition or reduction as compared to a reference level. “Complete inhibition” and the like is a 100% inhibition as compared to a reference level. A decrease can be preferably down to a level accepted as within the range of normal (e.g., for an individual without a given disorder).

[0111] The terms “increased”, “increase”, Ienhance”, or “activate” are all used herein to mean an increase by a statistically significant amount. In some embodiments, the terms “increased”, “increase”, “enhance”, or “activate” can mean an increase of at least 10% as compared to a reference level (e.g., the absence of a given treatment or agent) and can include, for example, of at least about 10% as compared to a reference level, for example an increase of at least about 20%, at least about 25%, at least about 30%, at least about 35%, at least about 40%, at least about 45%, at least about 50%, at least about 55%, at least about 60%, at least about 65%, at least about 70%, at least about 75%, at least about 80%, at least about 85%, at least about 90%, at least about 95%, at least about 98%, at least about 99%, or up to and including a 100% increase or any increase between 10-100% as compared to a reference level or at least about a 2-fold, or at least about a 3-fold, or at least about a 3-fold, or at least about a 4-fold, or at least about a 5-fold, or at least about a 10-fold increase, or any increase between 2-fold and 10-fold or greater as compared to a reference level. In the context of a marker or symptom, an “increase” is a statistically significant increase in such level.

[0112] As used herein, the term “isolated” encompasses a bacterium or other entity or substance that has been (1) separated from at least some of the components with which it was associated when initially produced (whether in nature, such as human stool, or in an experimental setting, such as a Petri plate consisting of artificial growth medium), and/or (2) produced, prepared, purified, and/or manufactured by the hand of man. Isolated bacterial, proteins, metabolites, or combinations thereof may be separated from at least about 10%, about 20%, about 30%, about 40%, about 50%, about 60%, about 70%, about 80%, about 90%, or more of the other components with which they were initially associated. In some embodiments, isolated bacteria, proteins, metabolites, or combinations thereof are more than about 80%, about 85%, about 90%, about 91%, about 92%, about 93%, about 94%, about 95%, about 96%, about 97%, about 98%, about 99% or more than about 99% pure. As used herein, a substance is “pure” if it is substantially free of other components (such as other bacterial species). The terms “purify”, “purifying”, and “purified” refer to a bacterium or other material that has been separated from at least some of the components with which it was associated either when initially produced or generated (e.g., when in nature or in an experimental setting), or during any time after its initial production, as recognized by those skilled in the art of bacterial cultivation or of relevant skill (e.g., chemistry). A bacterium or bacterial population can be considered purified if it is isolated at or after production, such as from a material or environment containing the bacterial or bacterial population, and a purified bacterium or bacterial population can contain other material up to about 10%, about 20%, about 30%, about 40%, about 50%, about 60%, about 70%, about 80%, about 90% or above about 90% and still be considered “isolated”. In some embodiments, purified bacterial and bacterial populations are more than about 80%, about 85%, about 90%, about 91%, about 92%, about 93%, about 94%, about 95%, about 96%, about 97%, about 98%, about 99% or more than about 99% pure. In the instance of bacterial compositions provided herein, the one or more bacterial types present in the composition can be independently purified from one or more other bacteria produced and/or present in the material or environment containing the bacterial type. In some embodiments, a bacterium or population of bacteria is “isolated” if it comprises a single stain of bacteria. In some embodiments, such isolated bacteria can be admixed or administered with other isolated bacteria (e.g., in a defined comsortium of isolated bacteria). Bacterial compositions and the bacterial components thereof are generally purified from residual habitat products.

[0113] The term “genome” as used herein includes the DNA comprising the genes (the coding nucleic acid sequences) and the noncoding nucleic acid sequences of a microorganism, and therefore includes introduction of the nucleic acid into, for example, the coding and noncoding DNA of the microorganism.

[0114] The term “Gram-variable” means giving a positive result and/or negative result in the Gram strain test (i.e., retaining the colour of the crystal violet staining reagent). Retention of crystal violet staining by a bacterium is linked to the thickness of the peptidoglycan layer in the bacterial cell wall. Gram-positive bacteria have a thicker peptidoglycan layer. Gram-staining is commonly used to help classify bacterial strains in the field of microbiology.

[0115] As used herein, the term “gut” is understood to refer to the human gastrointestinal tract, also known as the alimentary canal. The gut includes the mouth, pharynx, oesophagus, stomach, small intestine (duodenum, jejenum, ileum), large intestines (cecum and colon) and rectum. While the entire alimentary canal can be colonized by varying species of microbes, the majority of the gut microbiome, in terms of both numbers of species and biomass, resides in the intestines (small and large).

[0116] The terms “marker”, “biomarker” and the like, refer to any compound that can be measured as an indicator of the physiological status of a biological system. The marker may be a biomarker that comprises an amino acid sequence, a nucleic acid sequence and fragments thereof. Exemplary biomarkers include, but are not limited to cytokines, chemokines, growth and angiogenic factors, metastasis related molecules, cancer antigens, apoptosis related proteins, enzymes, proteases, adhesion molecules, cell signalling molecules and hormones. The marker may also be a sugar that, in some embodiments, may not be significantly metabolized in the biological system. The sugar may be, for example, mannitol, lactulose, sucrose, sucralose and combinations of any of the forgoing.

[0117] “Measuring” or “measurement” means assessing the presence, absence, quantity or amount (which can be an effective amount) of a given substance within a sample, including the derivation of qualitative or quantitative concentration levels of such substances, or otherwise evaluating the values or categorization of a subject's clinical parameters. Alternatively, the term “assaying,” “detecting” or “detection” may be used to refer to all measuring or measurement as described in this specification.

[0118] The term “mucosal healing” as used herein, means an improvement in one or more characteristics of that indicate an impaired mucosal layer. Such characteristics are usually determined by colonic endoscopy and include, but are not limited to, erythema, loss of vascular pattern, friability, bleeding, erosions and ulcers. In some circumstances, mucosal healing refers to a complete amelioration of detrimental effects that characterize an impaired mucosal layer. Alternatively, mucosal healing may refer to a reduction or improvement of one or more of the negative effects that characterize an impaired mucosal layer.

[0119] As used herein, the term “pharmaceutical composition” refers to the active agent in combination with a pharmaceutically acceptable carrier (e.g., a carrier commonly used in the pharmaceutical industry). The phrase “pharmaceutically acceptable” is employed herein to refer to those compounds, materials, compositions, and/or dosage forms which are, within the scope of sound medical judgement, suitable for use in contact with the tissues of human beings and animals without excessive toxicitiy, irritation, allergic response, or other problem or complication, commensurate with a reasonable benefit/risk ratio. In some embodiments of any of the aspects, a pharmaceutically acceptable carrier can be a carrier other than water. In some embodiments, any of the aspects a pharmaceutically acceptable carrier can be a cream, emulsion, gel, liposome, nanoparticle, and/or ointment. In some embodiments of any of the aspects, a pharmaceutically acceptable carrier can be an artificial or engineered carrier (e.g., a carrier that the active ingredient would not be found to occur in or within nature).

[0120] The term “phylogenetic tree” refers to a graphical representation of the evolutionary relationships of one genetic sequence to another that is generated using defined set of phylogenetic reconstruction algorithms (e.g., parsimony, maximum likelihood, or Bayesian). Nodes in the tree represent distinct ancestral sequences and the confidence of any node is provided by a bootstrap or Bayesian posterior probability, which measures branch uncertainty.

[0121] In some embodiments, the term “strain”, refers to a terminal leaf in a phylogenetic tree and is defined by a specific genetic sequence The specific genetic sequence may be a concatenated alignment of 120 ubiquitous single-copy proteins (Parks et al. 2018) extracted from a genome assembly using GTDB-tk (Chaumeil et al. 2020) or other tools known in the art.

[0122] The term “clade” refers to the set of members of a phylogenetic tree downstream of a stable node (bootstrap value >90%) in a phylogenetic tree. A clade is a group of related organisms representing all of the phylogenetic descendants of a common ancestor. The clade comprises a set of terminal leaves in the phylogenetic tree that is a distinct monophyletic evolutionary unit.

[0123] As used herein, “prebiotic” is understood to mean an ingredient that allows specific changes, both in the composition and/or activity in the gastrointestinal microbiota that may (or may not) confer benefits upon the host. Favoured prebiotics will be those which encourage growth of probiotic compositions or their beneficial functions, but not growth of pathogens nor genes associated with pathogenicity (e.g., toxins).

[0124] As used herein, “probiotic” is understood to mean “live microorganisms which when administered in adequate amounts confer a health benefit on the host”, as currently defined by the World Health Orgainization.

[0125] The term “species” is defined as a collection of closely related organisms with greater than 97% 16S ribosomal RNA (rRNA) sequence homology and greater than 70% genomic hybridization and sufficiently different from all other organisms so as to be recognized as a distinct unit. Species and other phylogenic identifications are according to the classification known to a person skilled in the art of microbiology.

[0126] As used herein, a “subject” means a human or animal. Usually the animal is a vertebrate such as a primate, rodent, domestic animal or game animal. Primates include chimpanzees, cynomologus monkeys, spider monkeys, and macaques (e.g., Rhesus). Rodents include mice, rates, woodchucks, ferrets, rabbits, and hamsters. Domestic and game animals include cows, horses, pigs, deer, bison, buffalo, feline species (e.g., domestic cat), canine species (e.g., dog, fox, wolf), avian species (e.g., chicken, emu, ostrich), and fish (e.g., trout, catfish, and salmon). In some embodiments the subject is a mammal (e.g., a primate (e.g., a human)). The terms “individual”, “patient” and “subject” are used interchangeably herein.

[0127] Preferably the subject is a mammal. The mammal can be a human, non-human primate, mouse, rat, dog, cat, horse or cow, but is not limited to these examples. Mammals other than humans can be advantageously used as subjects that represent animal models of inflammatory and autoimmune disorders (e.g., models of gut barrier function). A subject can be male or female.

[0128] As used herein, the terms “treat”, “treatment”, “treating” and the like, refer to therapeutic treatments, wherein the object is to reverse, alleviate, ameliorate, inhibit, slow down or stop the progression or severity of a condition associated with a disease or disorder (e.g., an inflammatory or autoimmune disorder). The term “treating” includes reducing or alleviating at least one adverse effect or symptom of a condition, disease or disorder associated with an inflammatory or autoimmune disorder. Treatment is generally “effective” if one or more symptoms or clinical markers are reduced. Alternatively, treatment is “effective” if the progression of a disease is reduced or halted. That is, “treatment” includes not just the improvement of symptoms or markers, but also a cessation of, or at least slowing of, progress or worsening of symptoms compared to what would be expected in the absence of treatment. Beneficial or desired clinical results include, but are not limited to, alleviation of one or more symptom(s), diminishment of extent of disease, stabilized (i.e., not worsening) state of disease, delay or slowing of disease progression, amelioration, or palliation of the disease state, remission (whether partial or total), and/or decreased mortality, whether detectable or undetectable. The term “treatment” of a disease also includes providing relief from the symptoms or side-effects of the disease (including palliative treatment). A treatment need not cure a disorder (i.e., complete reversal or absence of disease) to be considered effective.

[0129] In some embodiments, sequencing comprises 16S rRNA gene sequencing, which can also be referred to as “16S ribosomal RNA sequencing”, 16S rDNA sequencing” or “16s rRNA sequencing”. Sequencing of the 16S rRNA gene can be used for genetic studies as it is highly conserved between different species of bacteria, but it is not present in eukaryotic species. In addition to highly conserved regions, the 16S rRNA gene also comprises nine hypervariable regions (V1-V9) that vary between species. 16S rRNA gene sequencing typically comprises using a plurality of universal primers that bind to conserved regions of the 16S rRNA gene, PCT amplifying the bacterial 16S rRNA gene regions (including hypervariable regions), and sequencing the amplified 16S rRNA genes with a next-generation sequencing technology as described herein (see, also e.g., U.S. Pat. Nos. 5,654,418; 6,344,316; and 8,889,358; and U.S. Patent Publication Nos. US2013/157,265 and US2018/195,111, which are each incorporated by reference in their entireties).

[0130] Each embodiment described herein is to be applied mutatis mutandis to each and every embodiment unless specifically stated otherwise.

### 2. Bacterial Strains

[0131] The compositions of the invention comprise a bacterial strain of the genus Mediterraneibacter. The examples demonstrate that bacteria of this genus are useful for treating or preventing diseases associated with an impaired gut barrier function. The preferred bacterial strains are of the species M. faecis.

[0132] Mediterraneibacter is a genus of bacteria in the class Clostridia. The scientific classification is as follows: bacteria (kingdom); Firmicutes (phylum); Clostridia (class); Oscillospirales (order); Acutalibacteraceae (family); Mediterraneibacter (genus). Bacteria within the Mediterraneibacter genus are Gram-reaction-variable, non-motile bacteria with a coccoid shape, and are obligate anaerobes. These criteria are important because they can inform the phylogenetic classification of bacterial strains. For instance, the bacterial species M. faecis has previously been classified as belonging to the genus Ruminococcus and Faecalicatena, based on these criteria in particular.

[0133] M. faecis strains (previously characterized as Ruminococcus faecis) are described in Kim et al., 2011, with the current taxonomic reclassification described by Togo et al., 2018. The type strain M. faecis Eg2 (=JCM 15917) was isolated from human feces (Kim et al., 2011). The GenBank accession number for the 16S rRNA gene sequence of the M. faecis type strain JCM 15917 is NR_116747.

[0134] The breath of the Mediterraneibacter genus and M. faecis species are as defined by Genome Taxonomy Database reference tree, a taxonomic classification system as described in Oren et al., 2015 and Whitman et al., 2018.

[0135] The M. faecis bacterium deposited under accession number V21/006223 (i.e., M. faecis MH23-1) was tested in the Examples and is one of the preferred strains of the invention. M. faecis strain MH23-1 was deposited with the international depositary authority National Measurement Institute (NMI, 1/153 Bertie Street, Port Melbourne, Victoria, 3207, Australia) by Microba IP Pty Ltd (388 Queen Street, Brisbane, QLD 4000, Australia) on 31 Mar. 2021 as “Mediterraneibacter faecis MH23-1” and was assigned accession number V21/006223.

[0136] Exemplary 16S rRNA sequences for the M. faecis MH23-1 strain that was tested are set forth in SEQ ID NOs: 1-6. Bacterial strains of the species M. faecis may comprise a single 16 rRNA sequence within its genome, or more preferably, may comprise two or more 16S rRNA sequences within its genome (e.g., two copies, three copies, four copies, five copies, six copies, seven copies, eight copies, or more than eight copies). In some of the most preferred embodiments, the M. faecis MH23-1 strain has six copies of the 16S rRNA sequence, as identified in SEQ ID NOs:1-6. In some embodiments, a bacterial strain may be identified as being of the M. faecis MH23-1 strain by determining whether the strain comprises a 16S rRNA sequence that corresponds to any one of SEQ ID NOs: 1-6, by any method known in the art. The genome of M. faecis strain MH23-1 comprises a chromosome and plasmid. A chromosome sequence for M. faecis strain MH23-1 is provided in SEQ ID NO: 1. This sequence was generated using the Illumina NovSeq6000 platform.

[0137] Bacterial strains closely related to the strains MH23-1 are also shown in the examples to be effective for treating or preventing inflammatory and autoimmune disorders, through their beneficial effects on restoring gut barrier function.

[0138] For example, the M. faecis bacterium deposited under accession number V21/006224 (i.e., M. faecis MH23-2) was tested in the Examples and is another one of the preferred strains of the invention. M. faecis strain MH23-2 was deposited with the international depositary authority National Measurement Institute (NMI, 1/153 Bertie Street, Port Melbourne, Victoria, 3207, Australia) by Microba IP Pty Ltd (388 Queen Street, Brisbane, QLD 4000, Australia) on 31 Mar. 2021 March 2021 as “Mediterraneibacter faecis MH23-2” and was assigned accession number V21/006224.

[0139] Exemplary 16S rRNA sequences for the M. faecis MH23-2 strain that was tested are set forth in SEQ ID NOs: 7-12. In some of the most preferred embodiments, the M. faecis MH23-2 strain has six copies of the 16S rRNA sequence, as identified in SEQ ID NOs: 7-12. In some embodiments, a bacterial strain may be identified as being of the M. faecis MH23-2 strain by determining whether the strain comprises a 16S rRNA sequence that corresponds to any one of SEQ ID NOs: 7-12, by any method known in the art. The genome of M. faecis strain MH23-2 comprises a chromosome and plasmid. A chromosome sequence for M. faecis strain MH23-2 is provided in SEQ ID NO: 26.

[0140] Furthermore, the M. faecis bacterium deposited under accession number V21/006225 (i.e., M. faecis MH23-3) was also tested in the Examples and is another one of the preferred strains of the invention. M. faecis strain MH23-3 was deposited with the international depositary authority National Measurement Institute (NMI, 1/153 Bertie Street, Port Melbourne, Victoria, 3207, Australia) by Microba IP Pty Ltd (388 Queen Street, Brisbane, QLD 4000, Australia) on 31 Mar. 2021 as “Mediterraneibacter faecis MH23-3” and was assigned accession number V21/006225.

[0141] Exemplary 16S rRNA sequences for the M. faecis MH23-3 strain that was tested are set forth in SEQ ID NOs: 13-18. In some of the most preferred embodiments, the M. faecis MH23-3 strain has six copies of the 16S rRNA sequence, as identified in SEQ ID NOs: 13-18. In some embodiments, a bacterial strain may be identified as being of the M. faecis MH23-3 strain by determining whether the strain comprises a 16S rRNA sequence that corresponds to any one of SEQ ID NOs: 13-18, by any method known in the art. The genome of M. faecis strain MH23-3 comprises a chromosome and plasmid. A chromosome sequence for M. faecis strain MH23-3 is provided in SEQ ID NO: 27.

[0142] Further still, the M. faecis bacterium deposited under accession number V21/006226 (i.e., M. faecis MH23-4) was also tested in the Examples and is yet another one of the preferred strains of the invention. M. faecis strain MH23-4 was deposited with the international depositary authority National Measurement Institute (NMI, 1/153 Bertie Street, Port Melbourne, Victoria, 3207, Australia) by Microba IP Pty Ltd (388 Queen Street, Brisbane, QLD 4000, Australia) on 31 Mar. 2021 as “Mediterraneibacter faecis MH23-4” and was assigned accession number V21/006226.

[0143] Exemplary 16S rRNA sequences for the M. faecis MH23-4 strain that was tested are set forth in SEQ ID NOs: 19-24. In some of the most preferred embodiments, the M. faecis MH23-4 strain has six copies of the 16S rRNA sequence, as identified in SEQ ID NOs: 19-24. In some embodiments, a bacterial strain may be identified as being of the M. faecis MH23-4 strain by determining whether the strain comprises a 16S rRNA sequence that corresponds to any one of SEQ ID NOs: 19-24, by any method known in the art. The genome of M. faecis strain MH23-4 comprises a chromosome and plasmid. A chromosome sequence for M. faecis strain MH23-4 is provided in SEQ ID NO: 28.

[0144] In certain embodiments, the bacterial strains of the invention have a 16S rRNA sequence that is at least 97.5%, 98%, 98.5%, 99%, 99.5%, 99.6%, 99.7%, 99.8%, or 99.9% identical to the 16S rRNA sequence of a bacterial strain of M. faecis. Preferably, the bacterial strain of the invention has a 16S rRNA sequence that is at least 97.5%, 98%, 98.5%, 99%, 99.5%, 99.6%, 99.7%, 99.8%, or 99.9% identical to any one of SEQ ID NOs: 1-24. In some preferred embodiments, the bacterial strain of the invention has a 16S rRNA sequence represented by one or more of SEQ ID NOs: 1-6. In some other preferred embodiments, the bacterial strain of the invention has a 16S rRNA sequence represented by one or more of SEQ ID NOs: 7-12. In some alternative preferred embodiments, the bacterial strain of the invention has the 16S rRNA sequence represented by one or more of SEQ ID NOs: 13-18. In still some other preferred embodiments, the bacterial strain of the invention has a 16S rRNA sequence represented by one or more of SEQ ID NOs: 19-24.

[0145] The genome of the bacterial strain may comprise each of the 16S rRNA sequences set forth in SEQ ID NOs: 1-6. Alternatively, genome of the bacterial strain may comprise each of the 16S rRNA sequences set forth in SEQ ID NOs: 7-12. Alternatively, the genome of the bacterial strain may comprise each of the 16S rRNA sequences set forth in SEQ ID NOs: 13-18. Alternatively, the genome of the bacterial strain may comprise each of the 16S rRNA sequences set forth in SEQ ID NOs: 19-24.

[0146] In certain embodiments, the bacterial strain of the invention has a chromosome with sequence identity to any one of SEQ ID Nos: 25-28. In preferred embodiments, the bacterial strain of the invention has a chromosome with at least 90% sequence identity (e.g., at least 92%, 94%, 95%, 96%, 97%, 97.5%, 98%, 98.5%, 99%, 99.5%, or 100% sequence identity) to any one of SEQ ID NOs: 25-28 across at least 60% (e.g., at least 65%, 70%, 75%, 80%, 85%, 95%, 96%, 97%, 98%, 99% or 100%) of SEQ ID NO: 25-28. For example, the bacterial strain of the invention may have a chromosome with at least 90% sequence identity to any one of SEQ ID NOs: 25-28 across 70% of SEQ ID NOs: 25-28, or at least 90% sequence identity to any one of SEQ ID NOs: 25-28 across 80% of SEQ ID NOs: 25-28, or at least 90% sequence identity to any one of SEQ ID NOs: 25-28 across 90% of SEQ ID NOs: 25-28, or at least 90% sequence identity to any one of SEQ ID NOs: 25-28 across 100% of SEQ ID NOs: 25-28, or at least 95% sequence identity to any one of SEQ ID NOs: 25-28 across 70% of SEQ ID NOs: 25-28, or at least 95% sequence identity to any one of SEQ ID NOs: 25-28 across 80% of SEQ ID NOs: 25-28, or at least 95% sequence identity to any one of SEQ ID NOs: 25-28 across 90% of SEQ ID NOs: 25-28, or at least 95% sequence identity to any one of SEQ ID NOs: 25-28 across 100% of SEQ ID NOs: 25-28, or at least 98% sequence identity to any one of SEQ ID NOs: 25-28 across 70% of SEQ ID NOs: 25-28, or at least 98% sequence identity to any one of SEQ ID NOs: 25-28 across 80% of SEQ ID NOs: 25-28, or at least 98% sequence identity to any one of SEQ ID NOs: 25-28 across 90% of SEQ ID NOs: 25-28, or at least 98% sequence identity to any one of SEQ ID NOs: 25-28 across 100% of SEQ ID NOs: 25-28. A particularly preferred strain of the invention is the Mediterraneibacter faecis strain deposited under accession number V21/006223. This is the exemplary M. faecis MH23-1 strain tested in the DSS mouse model presented in the examples and shown to be effective for treating disease. Therefore, the invention provides a cell, such as an isolated cell, of the M. faecis strain deposited under accession number V21/006223, or a derivative thereof. The invention also provides a composition comprising a cell of the M. faecis strain deposited under accession number V21/006223, or a derivative thereof. The invention also provides a biologically pure culture of the M. faecis strain deposited under accession number V21/006223.

[0147] In some alternative embodiments, the invention provides a cell, such as an isolated cell, of the M. faecis strain deposited under accession number V21/006224, or a derivative thereof. The invention also provides a composition comprising a cell of the M. faecis strain deposited under accession number V21/006224, or a derivative thereof. The invention also provides a biologically pure culture of the M. faecis strain deposited under accession number V21/006224.

[0148] In some alternative embodiments, the invention provides a cell, such as an isolated cell, of the M. faecis strain deposited under accession number V21/006225, or a derivative thereof. The invention also provides a composition comprising a cell of the M. faecis strain deposited under accession number V21/006225, or a derivative thereof. The invention also provides a biologically pure culture of the M. faecis strain deposited under accession number V21/006225.

[0149] In some alternative embodiments, the invention provides a cell, such as an isolated cell, of the M. faecis strain deposited under accession number V21/006226, or a derivative thereof. The invention also provides a composition comprising a cell of the M. faecis strain deposited under accession number V21/006226, or a derivative thereof. The invention also provides a biologically pure culture of the M. faecis strain deposited under accession number V21/006226.

[0150] A derivative of the strains deposited under any one of the accession numbers V21/006223, V21/006224, V21/006225, and V21/006226 may be a daughter strain (progeny) or a strain cultured (subcloned) from the original. A derivative of a strain of the invention may be modified, for example at the genetic level, without ablating the biological activity. In particular, a derivative strain of the invention is therapeutically active. A derivative strain will have comparable activity to the original V21/006223, V21/006224, V21/006225, or V21/006226 strain from which it is derived. In particular, a derivative strain will elicit comparable effects in at least one disease model (e.g., colitis) as shown in the Examples, which may be identified by using the culturing and administration protocols described in the Examples. A derivative of any one of the V21/006223, V21/006224, V21/006225, and V21/006226 strains will generally be a biotype of the respective V21/006223, V21/006224, V21/006225, or V21/006226 strain.

[0151] References to cells of the M. faecis strains deposited under accession number V21/006223, V21/006224, V21/006225, and V21/006226 encompass any cells that have the same safety and therapeutic efficacy characteristics as the strains deposited under accession numbers V21/006223, V21/006224, V21/006225, and V21/006226, and such cells are encompassed by the invention.

[0152] In certain embodiments, the bacterial strains of the invention have a 16S rRNA sequence that is at least 97.5%, 98%, 98.5%, 99%, 99.5%, 99.6%, 99.7%, 99.8%, or 99.9% identical to the 16S rRNA sequence of a bacterial strain of M. lactaris. Preferably, the bacterial strain of the invention has a 16S rRNA sequence that is at least 97.5%, 98%, 98.5%, 99%, 99.5%, 99.6%, 99.7%, 99.8%, or 99.9% identical to any one of SEQ ID NOs: 29-32. In some preferred embodiments, the bacterial strain of the invention has a 16S rRNA sequence represented by SEQ ID NOs: 29-32. The genome of the bacterial strain may comprise one or more of the 16S rRNA sequences set forth in any one of SEQ ID NOs: 29-32. In some embodiments, the genome of the bacterial species may comprise at least three copies of a 16S rRNA sequence.

[0153] In certain embodiments, the bacterial strain of the invention has a chromosome with sequence identity to at least one of SEQ ID NOs: 33-38. In preferred embodiments, the bacterial strain of the invention has a chromosome with at least 90% sequence identity (e.g., at least 92%, 94%, 95%, 96%, 97%, 97.5%, 98%, 98.5%, 99%, 99.5%, or 100% sequence identity) to one or more of SEQ ID NOs: 33-38 across at least 60% (e.g., at least 65%, 70%, 75%, 80%, 85%, 95%, 96%, 97%, 98%, 99% or 100%) of SEQ ID NOs: 33-38. For example, the bacterial strain of the invention may have a chromosome with at least 90% sequence identity to one or more of SEQ ID NOs: 33-38 across 70% of SEQ ID NOs: 33-38, or at least 90% sequence identity to one or more of SEQ ID NOs: 33-38 across 80% of SEQ ID NOs: 33-38, or at least 90% sequence identity to one or more of SEQ ID NOs: 33-38 across 90% of SEQ ID NOs: 33-38, or at least 90% sequence identity to one or more of SEQ ID NOs: 33-38 across 100% of SEQ ID NOs 33-38, or at least 95% sequence identity to one or more of SEQ ID NOs: 33-38 across 70% of SEQ ID NOs: 33-38, or at least 95% sequence identity to one or more of SEQ ID NOs: 33-38 across 80% of SEQ ID NOs: 33-38, or at least 95% sequence identity to one or more of SEQ ID NOs: 33-38 across 90% of SEQ ID NOs: 33-38, or at least 95% sequence identity to one or more of SEQ ID NOs: 33-38 across 100% of SEQ ID NOs: 33-38, or at least 98% sequence identity to one or more of SEQ ID NOs: 33-38 across 70% of SEQ ID NOs: 33-38, or at least 98% sequence identity to one or more of SEQ ID NOs: 33-38 across 80% of SEQ ID NOs: 33-38, or at least 98% sequence identity to one or more of SEQ ID NOs: 33-38 across 90% of SEQ ID NOs: 33-38, or at least 98% sequence identity to one or more of SEQ ID NOs: 33-38 across 100% of SEQ ID NOs: 33-38.

### 2.1 Bacteria Biotypes

[0154] Bacterial strains that are biotypes of a bacterium deposited under any one of the accession numbers V21/006223, V21/006224, V21/006225, and V21/006226 are also expected to be effective for treating or preventing inflammatory and autoimmune disorders. A biotype is a closely related strain that has the same or very similar physiological and biochemical characteristics.

[0155] Strains that are biotypes of a bacterium deposited under any one of the accession numbers V21/006223, V21/006224, V21/006225, and V21/006226, and that are suitable for use in the invention may be identified by sequencing other nucleotide sequences for a bacterium deposited under accession numbers V21/006223, V21/006224, V21/006225, and V21/006226. For example, substantially the whole genome may be sequenced and a biotype strain of the invention may have at least 95%, 96%, 97%, 98%, 99%, 99.5% or 99.9% sequence identity across at least 80% of its whole genome (e.g., across at least 85%, 90%, 95% or 99%, or across its whole genome). Other suitable sequences for use in identifying biotype strains may include hsp60 or repetitive sequences such as BOX, ERIC, (GTG)5, or REP (Masco et al., 2003; Kim et al., 2019). Biotype strains may have sequences with at least 95%, 96%, 97%, 98%, 99%, 99.5% or 99.9% sequence identity to the corresponding sequence of a bacterium deposited under any one of accession numbers V21/006223, V21/006224, V21/006225, and V21/006226.

[0156] Alternatively, strains that are biotypes of a bacterium deposited under any one of the accession numbers V21/006223, V21/006224, V21/006225, and V21/006226, and restriction fragment analysis and/or PCR analysis, for example by using fluorescent amplified fragment length polymorphism (FAFLP) and repetitive DNA element (rep)-PCR fingerprinting, or protein profiling, or partial 16S or 23s rRNA sequencing. In preferred embodiments, such techniques may be used to identify other suitable M. faecis strains.

[0157] In certain embodiments, strains that are biotypes of a bacterium deposited under any one of accession numbers V21/006223, V21/006224, V21/006225, and V21/006226, and that are suitable for use in the invention are strains that provide the same pattern as a bacterium deposited under any one of accession numbers V21/006223, V21/006224, V21/006225, and V21/006226 when analysed by amplified ribosomal DNA restriction analysis (ARDRA), for example when using Sau3AI restriction enzyme (for exemplary methods and guidance see, for example, Sr\dot{u}tková et al., 2011). Alternatively, biotype strains are identified as strains that have the same carbohydrate fermentation patterns as a bacterium deposited under any one of accession numbers V21/006223, V21/006224, V21/006225, and V21/006226.

[0158] In some embodiments, bacterial strains useful in the invention may be identified by routinely profiling the production and consumption of metabolites by a bacterial strain. It is predicted that the bacterial strains described above and elsewhere herein effect production of propionate, lactate, acetate, and formate. Therefore, in some embodiments, the bacterial strains of the invention induce the production in vivo of one or more of the metabolites propionate, lactate, acetate, and formate. Additionally, in some embodiments the bacterial strains of the invention do not produce butyrate.

[0159] Other Mediterraneibacter strains that are useful in the compositions and methods of the invention, such as biotypes of a bacterium deposited under any one of accession numbers V21/006223, V21/006224, V21/006225, and V21/006226, may be identified using any appropriate method or strategy, including the assays described in the examples. For instance, strains for use in the invention may be identified by culturing in anaerobic TY or PYG media and/or administering the bacteria to the DSS-induced gut barrier function model and then assessing cytokine/chemokine levels, as described in the Examples. In particular, bacterial strains that have similar growth patterns, metabolic type and/or surface antigens to a bacterium deposited under any one of accession numbers V21/006223, V21/006224, V21/006225, and V21/006226 may be useful in the invention. A useful strain will have comparable immunomodulatory activity to any one of the V21/006223, V21/006224, V21/006225, and V21/006226 strains. In particular, a biotype strain will elicit comparable effects on host gut function. Furthermore, it is expected that a biotype will have a similar effect in a disease model (e.g., colitis, asthma, arthritis, multiple sclerosis and uveitis disease models) and comparable effects on cytokine/chemokine levels to the effects shown in the Examples, and which may be identified by using the culturing and administration protocols described in the Examples.

### 2.2 Bacterial Strain Viability.

[0160] In preferred embodiments, the bacterial strains in the compositions of the invention are viable. In preferred embodiments, the bacterial strains in the compositions of the invention are viable and capable of partially or totally colonising the intestine. In some preferred embodiments, the bacterial strains in the compositions of the invention are live. By way of an example, the bacterial strains in the compositions of the invention have not been heat-killed. The bacteria of the invention may have immune modulatory effects that would not be exhibited by non-viable bacteria, for example because non-viable bacteria cannot produce metabolites and interact with the immune system in a different manner. The cell surface of a viable bacterium is also likely to be significantly different to a killed bacterium, in particular a heat-killed bacterium.

[0161] In some alternative embodiments, that bacteria are not viable. For example, in some embodiments that bacter are heat-killed.

[0162] In some preferred embodiments, the bacterial strain for use in the invention is naturally-occurring. For example, the bacterial strain has been isolated from the mammalian digestive tract.

[0163] In some preferred embodiments, the bacterial strain for use in the invention has not been not genetically engineered. For example, the bacterial strain has not been transformed with recombinant DNA.

### 2.3 Antibiotic Resistance

[0164] In some embodiments, the bacterial strain for use in the invention is resistant to one of more of tetracycline, bacitracin, amoxicillin, ampicillin, arbekacin and dibekacin, azlocillin, bacampicillin, carbenicillin, ceftobiprole, clarithromycin, doripenem, erythromycin, fusidic acid, gentamicin, grepafloxacin, imipenem, josamycin, meropenem, meziocillin, piperacillin, rifampin, rifaximin, rokitamycin, rosaramicin, roxithromycin, spiramycin, streptomycin, sulfamethoxazole/trimethoprim, telithromycin, ticarcillin, ticarcillin/clavulanate, tosufloxacin, trimethoprim and virginiamycin. In certain embodiments, the bacterial strain for use in the invention is susceptible to Quinopristin-dalfopristin. In some preferred embodiments, the bacterial strain for use in the invention is resistant to tetracycline and/or bacitracin.

[0165] In certain embodiments, the bacterial strain for use in the invention is resistant to R-lactam antibiotics. In certain embodiments, the bacterial strain for use in the invention is resistant to tetraycline.

### 3. Compositions

[0166] Provided herein are compositions that comprise, consist, or consist essentially of a therapeutically effective amount of a bacterial strain or strains described above and/or elsewhere herein. In some embodiments, the bacteria in the compositions may be identified by strain, species, operational taxonomic unit (OTU), whole genome sequence, 16S rRNA sequence, or other methods known in the art for defining different types of bacteria.

### 3.1 Most Recent Common Ancestor (MRCA)

[0167] In some embodiments, the compositions comprise an effective amount of a bacterial strain that is a phylogenetic descendant of the MRCA of M. faecis and M. lactaris (FIG. 1). Preferably, the phylogenetic classification is as defined by the GTDB (Parks et al., 2018). In some embodiments, the phylogenetic classification is as defined in release 95 (r95) of the GTDB.

[0168] In some embodiments, determining if a bacterial strain is a descendant of a MRCA of M. faecis and M. lactaris may be performed using phylogenetic grouping procedures known in the art. In some embodiments, a rooted phylogenetic tree with M. faecis, M. lactaris and a third taxon of interest (e.g., a taxon to be classified) may be used, with the following the analysis packages being applied: Analyses of Phylogenetics and Evolution (“ape”; https://cran.r-project.org/web/packages/ape/index.html) and Phylogenetic Tool for Comparative Biology (“phytools”; http://cran.r-project.org/web/packages/phytools/index.html), in order to determine whether the taxon of interest is useful for the compositions of the present invention. Both ape and phytools are packages written in the R language for use in studying molecular evolution and phylogenetics. The ape and phytools packages provide methods for phylogenetic and evolutionary analysis and their use is known to one of skill in the art.

[0169] In some embodiments, the following script may be used:

library(“ape”)
library(“phytools”)
input.tree = read.tree(file=”tree_file”)
medi = (‘s_Mediterraneibacter_faecis’, ‘s_Mediterraneibacter_lactaris’))
medi.node = getMRCA(input.tree, medi)
medi.tree = extract.clade(input.tree, medi.node)
print(medi.tree$tip.label)

[0170] In some embodiments, after the script is run, if the taxon of interest is in the printed list, it is a descendant of a MRCA of the two species.

[0171] In other embodiments, different phylogenetic grouping methods known in the art may be used to determine if a bacterial strain is a descendant of a MRCA of M. faecis and M. lactaris (FIG. 1), including methods that use different analysis packages and are based on different programming languages.

[0172] In other embodiments, a bacterial species is a member of the family Ruminococcaceae if the species has a 16S rDNA sequence with sequence identity to 16S rDNA sequences from species already identified as a member of the family Ruminococcaceae. In an embodiment, identification of whether a bacterial species is a member of the family Ruminococcaceae is performed using the methods described in Yarza et al., 2014, Nature Reviews Microbiology 12:635-645, and Stackebrandt, E. & Ebers, J., 2006, Microbiol. Today 8:6-9, which are hereby incorporated by reference herein.

3.2 165 rRNA Sequence Identity.

[0173] In some embodiments, the 16S rRNA sequence is obtained or determined for a bacterial species to be classified. This query 16S rRNA sequence is compared to 16S rRNA sequences from bacterial species already classified as members of the Mediterraneibacter genus. In some embodiments, the query 16S rRNA sequence is compared to the 16S rRNA sequences set forth in any one of SEQ ID NOs: 1-24. In some alternative embodiments, the query 16S rRNA sequence is compared to the 16S rRNA sequences set forth in any one of SEQ ID NOs: 29-32. In some embodiments, the query 16S rRNA sequence is compared to all known 16S rRNA sequences for bacterial species already classified as members of the Mediterraneibacter genus. In other embodiments, the query 16S rDNA sequence is compared to a subset of all known 16S rDNA sequences for bacterial species already classified as members of the Mediterraneibacter genus. A percent identity between the query sequence and the compared sequences is determined. If the percent identify of the query sequence is determined to be above a defined threshold, then the bacterial species to be classified is classified as member of the Mediterraneibacter genus.

[0174] In some embodiments, the threshold sequence identity is 95%. In some embodiments, the threshold sequence identity is 97.5%. In some embodiments, the threshold sequence identity is 99.0%. In some embodiments, the threshold sequence identity is 94.5%, 94.6%, 94.7%, 94.8%, 94.9%, 95.0%, 95.1%, 95.2%, 95.3%, 95.4%, 95.5%, 95.6%, 95.7%, 95.8%, 95.9%, 96.0%, 96.1%, 96.2%, 96.3%, 96.4%, 96.5%, 96.6%, 96.7%, 96.8%, 96.9%, 97.0%, 97.1%, 97.2%, 97.3%, 97.4%, 97.5%, 97.6%, 97.7%, 97.8%, 97.9%, 98.0%, 98.1%, 98.2%, 98.3%, 98.4%, 98.5%, 98.6%, 98.7%, 98.8%, 98.9% 99.0%, 99.1%, 99.2%, 99.3%, 99.4%, 99.5%. 99.6%, 99.7%, 99.8%, 99.9% or 100%.

[0175] In some embodiments, the 16S rDNA sequence is obtained or determined for a bacterial species to be classified. This query 16S rDNA sequence is compared to 16S rDNA sequences from bacterial species already classified as members of the family Ruminococcaceae. In some embodiments, the query 16S rDNA sequence is compared to the 16S rDNA sequences listed in Table 11. In some embodiments, the query 16S rDNA sequence is compared to all known 16S rDNA sequences for bacterial species already classified as members of the family Ruminococcaceae. In other embodiments, the query 16S rDNA sequence is compared to a subset of all known 16S rDNA sequences for bacterial species already classified as members of the family Ruminococcaceae. A percent identity between the query sequence and the compared sequences is determined. If the percent identify of the query sequence is determined to be above a defined threshold, then the bacterial species to be classified is classified as member of the family Ruminococcaceae.

[0176] In some embodiments, the threshold sequence identity is 95%. In some embodiments, the threshold sequence identity is 98.7%. In some embodiments, the threshold sequence identity is 94.8%. In some embodiments, the threshold sequence identity is 94.5%, 94.6%, 94.7%, 94.8%, 94.9%, 95.0%, 95.1%, 95.2%, 95.3%, 95.4%, 95.5%, 95.6%, 95.7%, 95.8%, 95.9%, 96.0%, 96.1%, 96.2%, 96.3%, 96.4%, 96.5%, 96.6%, 96.7%, 96.8%, 96.9%, 97.0%, 97.1%, 97.2%, 97.3%, 97.4%, 97.5%, 97.6%, 97.7%, 97.8%, 97.9%, 98.0%, 98.1%, 98.2%, 98.3%, 98.4%, 98.5%, 98.6%, 98.7%, 98.8%, 98.9% 99.0%, 99.1%, 99.2%, 99.3%, 99.4%, 99.5%. 99.6%, 99.7%, 99.8%, 99.9% or 100%.

### 4. Functional Features of Bacterial Strains

[0177] Gut barrier dysregulation is the prototypical function leading to systemic inflammation. As demonstrated in the examples, the bacterial strains of the invention, and compositions comprising said strains, are effective at enhancing gut barrier function.

[0178] All inflammatory or autoimmune disorders mediated by gut barrier dysregulation causing systemic inflammation in the subject are applicable for treatment with the bacterial strains described above and/or elsewhere herein.

### 4.1 Gut Barrier Function

[0179] Gut barrier (also known as intestinal barrier) function regulates transport and host defense mechanisms at the mucosal interface with the outside world. Transcellular and paracellular fluxes are tightly controlled by membrane pumps, ion channels and tight junctions, adapting permeability to physiological needs. Disturbance at any level, but particularly bacterial translocation due to increased permeability and breakdown of oral tolerance due to compromised epithelial and T cell interaction, can result in inflammation and tissue damage.

[0180] The translocation of foreign (i.e., non-host) substances such as lipopolysaccharide (LPS) and other inflammatory compounds from the luminal side of the intestine into the circulating system is inhibited by the epithelial barrier. One of the functions of this epithelial barrier is performed by the tight junctions. Tight junctions, or zonula occludens, are the closely associated areas of two epithelial cells whose membranes join together forming a virtual impermeable barrier to fluid, thereby separating the vascular system from the lumen of the digestive tract. Thus, a reduction of the tight junction barrier function has been demonstrated to result in an increased translocation of undesirable substances such as LPS from intestinal lumen into the circulating system.

[0181] The present invention provides methods of restoring or improving gut barrier function in a subject, the method comprising administering to the subject a composition that comprises a bacterial strain of Mediterraneibacter faecis, to thereby restore or improve the gut barrier function in the subject. As used in this specification, gut barrier integrity refers to a measure of gut barrier function. High gut barrier integrity can be associated with a lack of gut or intestinal permeability, wherein a high level of gut permeability is indicative of low gut barrier integrity. In a related embodiment, the invention also provides methods of maintaining healthy or normal gut barrier function. Such methods may be used to prevent gut barrier dysregulation is subjects considered to be at high risk of gut barrier dysregulation (e.g., subjects in remission of IBD).

[0182] In some embodiments, at least one biomarker measured in a sample (and, in particular, a biological sample) is used to assess the change, in particular, an improvement, in the gut barrier integrity of a subject.

[0183] In some embodiments of the methods and uses provided in this specification, the composition comprising a bacterial strain of M. faecis may increase or decrease the levels of one or more biomarkers of gut barrier integrity in a sample from a subject. In some embodiments, depending on the particular biomarker, either an increase or a decrease in the level of the marker is indicative of an increase in gut barrier integrity and/or a decrease in gut permeability. In some embodiments, the biomarker is selected from a cytokine, chemokine, growth factor, angiogenic factor, enzyme, protease, adhesion molecule, cell signalling molecule, hormone or sugar. In some embodiments, the biomarker comprises a cytokine. In some embodiments, the marker comprises a chemokine. In some embodiments, the marker comprises a growth factor. In some embodiments, the marker comprises an angiogenic factor. In some embodiments, the marker comprises an enzyme. In some embodiments, the marker comprises a protease. In some embodiments, the marker comprises an adhesion molecule. In some embodiments, the marker comprises a cell signalling molecule. In some embodiments, the marker comprises a hormone. In some embodiments, the marker comprises a sugar.

[0184] This specification provides assays for biomarkers of intestinal permeability. Biological samples from the subject such as blood (plasma, or serum) or tissue may be used to measure levels of any suitable biomarker including one or more of LPS, lipopolysaccharide binding protein (LPSBP), intestinal fatty acid binding protein (IFABP), zonulin, bacterial and/or 16S rRNA, but is not limited to these markers. LPS, I-FABP and Zonulin may be measured by enzyme-linked immunosorbent assay (“ELISA”). Techniques and kits for ELISA are well known to those in the art. In some embodiments, elevated LPS, I-FABP and/or Zonulin, when compared to a control in blood, serum, saliva, urine and/or plasma, is used as an indicator of increased intestinal permeability, and, thus, lower gut barrier integrity.

[0185] LPSBP may also be measured by ELISA. In some embodiments, significant changes in LPSBP either higher or lower, when compared to a control, may be used as an indicator of increased intestinal permeability and can confirm a reduced gut barrier integrity.

[0186] In some embodiments, increases in bacterial 16S rRNA is used as an indicator of increased intestinal permeability, and, therefore, a reduction in gut barrier integrity. Bacterial 16S rRNA may be purified from blood, serum, organ tissue or urine using standard nucleic acid isolation protocols. These are, for example, commercially available. The isolated nucleic acids may be detected by qPCR amplification using primers specific for bacterial 16S rRNA sequences or amplification using primers specific for bacterial 16S rRNA and sequencing the resultant amplicons.

[0187] Tight junction proteins that are expressed by the intestinal epithelial cells and regulate intestinal permeability may also be used as biomarkers of intestinal permeability. In some embodiments, tight junction proteins are assayed to determine alterations in intestinal permeability and gut barrier integrity. In some embodiments, the proteins measured may include, but are not limited to, claudins, occludin, ZO-1, and E-cadherin (adherens junction) proteins. Other tight junction proteins may also be assayed. In some embodiments, the tight junction proteins are measured using an immunohistochemical stain. In some embodiments, the tight junction proteins are measured using ELISA.

[0188] In some embodiments, plasma citrulline is assayed to determine alterations in intestinal permeability and gut barrier integrity. A reduction in plasma citrulline levels corresponds to a loss in epithelial cell mass indicating an increase in gut barrier permeability.

[0189] In some embodiments, the method includes oral administration of an insoluble sugar such as sucralose, collection of a bodily fluid such as urine or blood after one or more defined periods of time, and measurement of the insoluble sugar contained in the bodily fluid through standard clinical analytical techniques. The insoluble sugars may include, but are not limited to, mannitol, lactulose, sucrose, sucralose and combinations of any of the foregoing.

[0190] In some embodiments, gut barrier integrity is measured using an in vitro assay. A particularly preferred in vitro assay suitable for measuring gut barrier function is by trans-epithelial electrical resistance (TEER). Such assays are well known in the field (e.g., Srinivasan, 2015; and Lea, 2015).

### 4.2 Mucosal Healing

[0191] Mucosal healing has become an important endpoint to assess the therapeutic effect in inflammatory and autoimmune disorders. The definition of full mucosal healing currently used in IBD (e.g., CD and UC) clinical trials is the “complete absence of all inflammatory and ulcerative lesions”, but this definition lacks validation and does not include mucosal improvement and grading of mucosal healing.

[0192] Mucosal healing is predominantly defined by endoscopic assessment of intestinal inflammation. In order to evaluate the presence or absence of mucosal healing on endoscopy, various endoscopic scoring systems have been developed. These indices allow for the determination of improvements of endoscopic lesions, even when the rather rigid endpoint of mucosal healing and thereby the total disappearance of all mucosal ulcerations is not met. The endoscopic component of the clinical Mayo score, introduced in 1987, is currently the most used score of the mucosal layer in clinical practice (see, Schroeder et al., 1987). It includes the variables erythema, loss of vascular pattern, friability, bleeding, erosions and ulcers, and ranges from 0 to 3. MH is classically considered to be a score of 0 (normal mucosa) or 1 (mucosal erythema, decreased vascular pattern, mild friability) (D'Haens, 2007).

[0193] In some other embodiments, mucosal healing is determined to have occurred when the patient is determined to have an endoscopy sub-score of 0 or 1 as assessed by flexible sigmoidoscopy. In certain such embodiments, patients who experience mucosal healing are determined to have an endoscopy sub-score of 0.

[0194] Both corticosteroids and aminosalicylates have been used for decades and are among the most commonly prescribed drugs for repairing the mucous layer (e.g., in patients with UC) (Carvalho and Cotter, 2017). The mechanisms through which they reduce mucosal inflammation include controlling nuclear factor (NF)-kB expression and inflammatory cytokines (directly modulating cell migration and proliferation of epithelial cell lines. Anti-TNF drugs (e.g., infliximab, adalimumab, and golimumab) act at several steps of mucosal injury, restricting the inflammatory infiltrate and T cell proliferation within the lamina propria (Baert, 1999), and downregulating the expression of metalloproteinases and proinflammatory molecules (Baert, 1999). They also act on the regenerative process, restoring the protective capabilities of the mucosa by reinforcing intestinal permeability and mucosal secretion, activating fibroblasts, and maintaining epithelia regeneration (Suenaert, 2002).

[0195] Other measures of assessing mucosal healing are well known in the art, including the measurement of biomarkers C-reactive protein and calprotectin. An advantage of using in vitro biomarker assays for the assessment of mucosal healing is that such assays are typically far less invasive for the subject. Histopathology is another measure of inflammation, which has been cited as being particularly informative for mucosal healing.

### 4.3 STAT3 Signalling Pathway

[0196] Cytokine pathways mediate a broad range of biological functions, including many aspects of inflammation and immunity. The Janus kinases (JAK), including JAK1, JAK2, JAK3 and tyrosine kinase 2 (TYK2), are cytoplasmic tyrosine kinases that associate with type I and type II cytokine receptors and regulate cytokine signal transduction. Cytokine engagement with cognate receptors triggers activation of receptor associated JAKs and this leads to JAK-mediated tyrosine phosphorylation of signal transducer and activator of transcription (STAT) proteins and ultimately transcriptional activation of specific gene sets (Schindler et al., 2007, J. Biol. Chem. 282: 20059-63). Cytokine receptors are typically functional as heterodimers, and as a result, more than one type of JAK kinase is usually associated with a cytokine receptor complex. The specific JAKs associated with different cytokine receptor complexes have been determined in many cases through genetic studies and corroborated by other experimental evidence.

[0197] STAT3 plays an important role in the activation of several autoimmune and inflammatory disorders, including IBD. The bacterial strains of the present invention significantly suppress IL-23-mediated STAT3 activation. Thus, the present invention provides methods of suppressing or otherwise inhibiting STAT3 signalling in a subject (i.e., IL-23-mediated STAT3 signalling), the method comprising administering to the subject a composition that comprises bacterial strain as described above and/or elsewhere herein. Accordingly, in some embodiments the bacterial strains described herein directly or indirectly suppress STAT3 activity. In some embodiments, the strain of M. faecis produces a bioactive molecule that binds directly to a STAT3 polypeptide. In some alternative embodiments, the bacterial strain is an indirect inhibitor of STAT3 activation, for example, by binding to a molecule upstream of STAT3 in the IL-23-mediated STAT3 signalling pathway, or by binding to a molecule that regulates STAT3 activity (e.g., ubiquitination). By way of an illustrative example, the bioactive agent may directly bind or antagonize any one of IL-23, JAK2, or TYK2 in order to suppress the IL-23-mediated STAT3 signalling pathway.

### 4.4 Th17 Inflammatory Response

[0198] Some bacterial compositions of the invention are effective for reducing the Th17 inflammatory response. In particular, treatment with the compositions described above and elsewhere herein may modulate Th17 pathway cytokines (including TNF, IL-22, IL-21, and IL-17), and result in clinical improvements in animal models of conditions mediated by the Th17 pathway. Therefore, the compositions of the invention may be useful for treating or preventing inflammatory and autoimmune disorders, and in some embodiments, diseases or conditions mediated by Th17. In particular, the compositions of the invention may be useful for reducing or preventing elevation of the Th17 inflammatory response.

[0199] Th17 cells are a subset of T helper cells that produce, among other cytokines, IL-17A, IL-17F, IL-21 and IL-22. Th17 cell differentiation may be driven by IL-23. These cytokines and others form important parts of the Th17 pathway, which is a well-established inflammatory signalling pathway that contributes to and underlies a number of inflammatory and autoimmune disorders (as described in, for example, Ye, 2015; Fabro, 2015; Yin, 2014; Cheluvappa, 2014; Schieck, 2014; Balato, 2014). Some diseases that are mediated by Th17 can be ameliorated or alleviated by repressing the Th17 pathway, which may be through a reduction in the differentiation of Th17 cells or a reduction in their activity or a reduction in the level of Th17 pathway cytokines. Diseases mediated by the Th17 pathway may be characterised by increased levels of cytokines produced by Th17 cells, such as IL-17A, IL-17F, IL-21, IL-22, IL-26, IL-9 (reviewed in Monteleone, 2011). Diseases mediated by the Th17 pathway may be characterised by increased expression of Th17-related genes, such as STAT3 or IL-23 receptor. Diseases mediated by the Th17 pathway may be associated with increased levels of Th17 cells.

[0200] IL-17 is a key cytokine that links T cells activation to neutrophils activation and mobilization, hence IL-17 plays a pivotal role in innate immunity. However, due to its role in neutrophils activation, can contribute to inflammatory autoimmune diseases such as inflammatory bowel disease, psoriasis, and rheumatoid arthritis. IL-17 as used herein may refer to any member of the IL-17 family, including IL-17A, IL-17B, IL-17C, IL-17D, IL-17E, and IL-17F. IL-17-mediated diseases and conditions are characterised by high expression of IL-17 and/or the accumulation, or presence of IL-17-positive cells in a tissue affected by the disease or condition. Similarly, IL-17-mediated diseases and conditions are diseases and conditions that are exacerbated by high IL-17 levels or an increase in IL-17 levels, and that are alleviated by low IL-17 levels or a reduction in IL-17 levels. The IL-17 inflammatory response may be local or systemic.

[0201] Examples of diseases and conditions that may be mediated by the Th17 pathway include (but are not limited to) inflammatory bowel disease (such as Crohn's disease and ulcerative colitis); multiple sclerosis; arthritis (such as rheumatoid arthritis, osteoarthritis, psoriatic arthritis, and juvenile idiopathic arthritis); neuromyelitis optica (Devic's disease); ankylosing spondylitis; spondyloarthritis; psoriasis; systemic lupus erythematosus; celiac disease; asthma (such as allergic asthma or neutrophilic asthma); chronic obstructive pulmonary disease (COPD); cancer (such as breast cancer, colon cancer, lung cancer or ovarian cancer); uveitis; scleritis; vasculitis; Behcet's disease; atherosclerosis; atopic dermatitis; emphysema; periodontitis; allergic rhinitis; and allograft rejection. Accordingly, in some aspects the present invention provides methods for treating or preventing one or more of these conditions or diseases, by administering a composition as described above and/or elsewhere herein. In further preferred embodiments, these conditions or diseases are mediated by the STAT3 signalling pathway. In further preferred embodiments, these conditions or diseases are mediated through the Th17 pathway.

[0202] In certain embodiments, the present invention provides methods compositions of the invention are for use in a method of reducing Th17 cell differentiation in the treatment or prevention of a disease or condition mediated by the Th17 pathway. In certain embodiments, the compositions of the invention are for use in treating or preventing an inflammatory or autoimmune disorder, wherein said treatment or prevention is achieved by reducing or preventing elevation of the Th17 inflammatory response. In certain embodiments, the compositions of the invention are for use in treating a patient with an inflammatory or autoimmune disorder, wherein the patient has elevated IL-17 levels or elevated Th17 cells or is exhibiting a Th17 inflammatory response. In certain embodiments, the patient may have been diagnosed with a chronic inflammatory or autoimmune disorder or condition, or the composition of the invention may be for use in preventing an inflammatory or autoimmune disorder or condition developing into a chronic inflammatory or autoimmune disorder or condition. In certain embodiments, the disease or condition may not be responsive to treatment with TNF inhibitors. These uses of the invention may be applied to any of the specific disease or conditions listed in the preceding paragraph.

[0203] The Th17 pathway are often associated with chronic inflammatory and autoimmune disorders, so the compositions of the invention may be particularly useful for treating or preventing chronic diseases or conditions as listed above. In certain embodiments, the compositions are for use in patients with chronic disease. In certain embodiments, the compositions are for use in preventing the development of chronic disease.

[0204] The compositions of the invention may be useful for treating diseases and conditions mediated by the Th17 pathway and for addressing the Th17 inflammatory response, so the compositions of the invention may be particularly useful for treating or preventing chronic disease, treating or preventing disease in patients that have not responded to other therapies (such as treatment with TNF inhibitors), and/or treating or preventing the tissue damage and symptoms associated with Th17 cells. For example, IL-17 is known to activate matrix destruction in cartilage and bone tissue and IL-17 has an inhibitory effect on matrix production in chondrocytes and osteoblasts, so the compositions of the invention may be useful for treating or preventing bone erosion or cartilage damage.

[0205] In certain embodiments, treatment with compositions of the invention provides a reduction or prevents an elevation in IL-17 levels, in particular IL-17A levels. In certain embodiments, treatment with compositions of the invention provides a reduction or prevents an elevation in IFN-γ or IL-6 levels. Such reduction or prevention of elevated levels of these cytokines may be useful for treating or preventing inflammatory and autoimmune disorders and conditions, in particular those mediated by the Th17 pathway.

### 4.5 Th1 Inflammatory Response

[0206] CD4⁺ T cells play an important role in inflammatory disease/disorder pathogenesis, with many subsets of CD4⁺ T cells having been identified as drivers in perpetuating chronic intestinal inflammation (see, Imam et al., 2018). For example, T helper type 1 (Th1) cells accumulate in the intestinal tract of individuals with IBD, and are directly associated with disease. Interferon-γ (IFN-γ) is the defining cytokine produced by Th1 cells. During intestinal inflammation IFN-γ in combination with TNF is proposed to drive intestinal epithelial cell β-catenin signalling and limit their differentiation and proliferation (Imam et al., 2018).

### 5. Methods of Treatment

[0207] In some embodiments, the present invention provides methods of treating or preventing an inflammatory or autoimmune disorder in a subject, the methods comprising administering to the subject a bacterial strain as described above and/or elsewhere herein.

[0208] Suitably, the inflammatory or autoimmune disorder is selected from the group comprising: an inflammatory bowel disease (such as Crohn's disease or ulcerative colitis); asthma (such as allergic asthma or neutrophilic asthma); arthritis (such as rheumatoid arthritis, osteoarthritis, psoriatic arthritis, or juvenile idiopathic arthritis); fatty liver disease (such as nonalcoholic fatty liver disease (NAFLD)); ankylosing spondylitis; psoriasis; systemic lupus erythematosus (SLE); scleroderma; Sjogren's syndrome; vasculitis; and type 1 diabetes mellitus.

### 5.1 Inflammatory Bowel Disease (IBD)

[0209] The examples demonstrate that the compositions of the invention have a beneficial restorative effect on gut barrier function and that they also have anti-inflammatory properties, and so they may be useful in the treatment of IBD. Accordingly, in some embodiments the invention provides a composition comprising a bacterial strain of the genus Mediterraneibacter for use in a method of treating or preventing an inflammatory bowel disease. The inventors have identified that treatment with Mediterraneibacter strains reduces severity of colitis in a mouse model of disease. Thus, the compositions of the invention may be useful in the treatment of inflammatory diseases. In some embodiments, the compositions of the invention are for use in the treatment or prevention of an IBD. In some embodiments, the invention provides methods of treating or preventing ulcerative colitis. In some embodiments, the invention provides methods of treating or preventing of Crohn's disease. In certain embodiments, the invention provides methods of treating or preventing ulcerations and/or bleeding in the treatment of an IBD, in particular in the treatment of colitis and ulcerative colitis. In preferred embodiments, the invention provides a method of treating or preventing IBD in a subject, the method comprising administering to the subject a composition comprising a bacterial strain of the species Mediterraneibacter faecis. In further preferred embodiments, the invention provides a method of treating or preventing colitis, (particularly ulcerative colitis) in a subject, the method comprising administering to the subject a composition comprising a bacterial strain of the species Mediterraneibacter faecis. In further preferred embodiments, the invention provided methods of reducing at least one side effect of colitis (particularly ulcerative colitis), including ulcerations and/or bleeding.

[0210] IBD is a complex disease that can be caused by multiple environmental and genetic factors. Factors contributing to the onset of IBD include diet, microbiota, intestinal permeability, and genetic susceptibility to increased inflammatory response to gut infection. Symptoms of inflammatory bowel disease include abdominal pain, vomiting, diarrhea, rectal bleeding, severe internal cramps/muscle spasms in the pelvic region, weight loss and anaemia. In certain embodiments, the compositions are for use in reducing one or more symptoms associated with IBD. In certain embodiments, the compositions of the invention are for use in preventing one or more symptoms of IBD.

[0211] IBD may accompany other diseases or conditions, such as cardiovascular disease, neuropsychological disorders, and metabolic syndrome. In certain embodiments, the compositions of the invention are for use in the treatment or prevention of one or more diseases or conditions that accompany IBD.

[0212] IBD is generally diagnosed by biopsy or colonoscopy. Measurements of faecal calprotectin is useful for the preliminary diagnosis of IBD. Other laboratory test for the diagnosis of IBD include, complete blood count, erythrocyte sedimentation rate, comprehensive metabolic panel, faecal occult blood test or C-reactive protein test. Typically, a combination of laboratory testing and biopsy/colonoscopy will be used to confirm diagnosis of IBD. In certain embodiments, the compositions of the invention are for use in a subject diagnosed with IBD.

[0213] In certain embodiments the IBD is Crohn's disease and/or ulcerative colitis. As broadly described above, studies have shown that several inflammatory cytokines are upregulated in the inflammatory mucosa of patients with Crohn's disease and ulcerative colitis, including but not limited to STAT3 signalling and NFκB signalling pathway-mediated cytokines (e.g., IL-17, TNF, IL-21, IL-22). Therefore, inhibition of STAT3 signalling pathway-mediated cytokine activity and/or NFκB signalling pathway-mediated cytokines may be useful in the treatment of Crohn's disease and ulcerative colitis. In certain embodiments, the compositions of the invention are for use in the treatment or prevention of Crohn's disease and/or ulcerative colitis.

[0214] Crohn's disease and ulcerative colitis are complex diseases with an array of probable causes, including genetic risk factors, diet, other lifestyle factors, such as smoking and alcohol consumption, and microbiome composition. Crohn's disease can manifest anywhere along the GI tract, whereas ulcerative colitis is typically prevalent in the large intestine and colon.

[0215] Gastrointestinal symptoms of IBD range from mild to severe and include abdominal pain, diarrhea, faecal blood, ileitis, increased bowel movements, increased flatulence, intestinal stenosis, vomiting, and perianal discomfort. The compositions of the invention may be for use in the treatment of prevention of one or more gastrointestinal symptoms of Crohn's disease and/or ulcerative colitis.

[0216] Systemic symptoms of Crohn's disease and ulcerative colitis include growth defects, such as the inability to maintain growth during puberty, decreased appetite, fever and weight loss. Extra-intestinal features of Crohn's disease include uveitis, photobia, episcleritis, gall stones, seronegative spondyloarthropathy, arthritis, enthesitis, erythema nodosum, pyoderma gangrenosum, deep venous thrombosis, pulmonary embolism, autoimmune haemolytic anaemia, clubbing and osteoporosis. Extra-intestinal features are additional conditions associated with Crohn's disease and/or ulcerative colitis that manifest outside the GI tract. Subjects with Crohn's disease also exhibit increased susceptibility to neurological complications such as seizures, strokes, myopathy, peripheral neuropathy, headache and depression. In certain embodiments, the compositions of the invention are for use in the treatment or prevention of one or more systemic symptoms of Crohn's disease and/or ulcerative colitis. In certain embodiments, the compositions of the invention are for use in the treatment or prevention of one or more extra-intestinal features of Crohn's disease and/or ulcerative colitis.

[0217] The diagnosis of Crohn's disease and ulcerative colitis usually involves carrying out multiple tests and surgical procedures, such as gastroscopy and/or colonoscopy and biopsy, typically of the ileum, radiologic tests, complete blood counts, C-reactive protein tests and erythrocyte sedimentation rates. In certain embodiments, the compositions of the invention are for use in subjects diagnosed with Crohn's disease or ulcerative colitis. In some embodiments, compositions of the invention are for use in treating a subject who has been diagnosed with Crohn's disease or ulcerative colitis.

[0218] Crohn's disease and ulcerative colitis are classified depending on the extent of the region of the GI tract affected (Gasche et al., 2000). A Crohn's disease of both the ileum and colon is classified as Ileocolic Crohn's. In some embodiments, the compositions are for use in the treatment or prevention of Ileocolic Crohn's. In some embodiments, the compositions are for use in a subject diagnosed with Ileocolic Crohn's/Crohn's ileitis is classified if only the ileum is affected. Crohn's colitis is classified if only the colon is affected. In certain embodiments, the compositions are for use in the treatment or prevention of Crohn's ileitis. In some embodiments, the compositions are for use in a subject diagnosed with Crohn's ileitis. In certain embodiments, the compositions are for use in the treatment or prevention of Crohn's colitis. In some embodiments, the compositions are for use in a subject diagnosed with Crohn's colitis.

[0219] Crohn's disease and ulcerative colitis may be treated with a number of therapeutic agents, such as corticosteroids, such as prednisone, immunosuppressive agents, such as azathioprine, or biologics, such as infliximab, adalimumab, and golimumab, vedolizumab and etrolizumab. In certain embodiments, the compositions of the invention are for use in the treatment or prevention of Crohn's disease or ulcerative colitis in combination with an additional therapeutic agent, including but not limited to those listed above. In certain embodiments, the additional therapeutic agent is for use in the treatment or prevention of Crohn's disease and/or ulcerative colitis.

### 5.2 Autoimmune Disorders

[0220] In humans, signs of intestinal inflammation are detectable before the clinical onset of many autoimmune disorders, such as type 1 diabetes (T1D) (Bosi, 2006). Similarly, augmented gut permeability appears before the development of insulitis in diabetes-prone rats in comparison with diabetes-resistant rats (Meddings, 1999; Neu, 2005). Those findings indicate that the breakage of gut barrier integrity with subsequent increased antigen trafficking and occurrence of low-grade intestinal inflammation precede the onset of T1D and are directly related to its pathogenesis, rather than secondary to diabetes-induced metabolic alterations (i.e., hyperglycemia). The gastrointestinal barrier is a fundamental gatekeeper to avoid the contact between luminal content and the human body. The barrier is composed of a mucus layer and an intestinal epithelial barrier (IEB), and both are crucial to prevent the passage of commensal bacteria, pathogens, and food antigens from the lumen into the gut tissue and systemic circulation. The IEB is a single layer of epithelial cells held together by a complex junctional system composed of tight junctional adhesion molecules (JAMs), tricellulin, and angulins whose interaction between themselves and with intracellular scaffolding proteins, i.e., zonula occludens proteins (ZOs), is fundamental to maintain tight junction integrity and control paracellular trafficking. In patients and rat models of T1D alterations of the IEB have been reported in association with gut inflammation (Meddings, 1999; Sapone, 2006). Furthermore, the importance of the gut mucus layer, an important gut barrier containing immunoregulatory molecules such as antimicrobial peptides and mucins, has recently been reported (see, Sorini et al., 2019).

[0221] In some embodiments, bacterial strains from the species Mediterraneibacter faecis may provide therapeutic benefits in the treatment or prevention of asthma, such as allergic asthma or neutrophilic asthma. In certain embodiments, the compositions of the invention are for use in the treatment or prevention of asthma in a subject. In certain embodiments, the invention provides a composition comprising a bacterial strain of the species Mediterraneibacter faecis for use in the treatment or prevention of asthma.

[0222] In some embodiments, bacterial strains from the species M. faecis may provide therapeutic benefits in the treatment or prevention of GVHD. In certain embodiments, the compositions of the invention are for use in the treatment or prevention of GVHD in a subject. In preferred embodiments, the invention provides a composition comprising a bacterial strain of the species M. faecis for use in the treatment or prevention of GVHD.

[0223] In some embodiments, bacterial strains from the species M. faecis may provide therapeutic benefits in the treatment or prevention of arthritis, such as rheumatoid arthritis, osteoarthritis, psoriatic arthritis, or juvenile idiopathic arthritis. In certain embodiments, the compositions of the invention are for use in the treatment or prevention of arthritis in a subject. In certain embodiments, the invention provides a composition comprising a bacterial strain of the species M. faecis for use in the treatment or prevention of arthritis.

[0224] In some embodiments, bacterial strains from the species M. faecis may provide therapeutic benefits in the treatment or prevention of multiple sclerosis. In certain embodiments, the compositions of the invention are for use in the treatment or prevention of multiple sclerosis in a subject. In certain embodiments, the invention provides a composition comprising a bacterial strain of the species M. faecis for use in the treatment or prevention of multiple sclerosis.

[0225] In some embodiments, bacterial strains from the species M. faecis may provide therapeutic benefits in the treatment or prevention of psoriasis. In certain embodiments, the compositions of the invention are for use in the treatment or prevention of psoriasis in a subject. In certain embodiments, the invention provides a composition comprising a bacterial strain of the species M. faecis or use in the treatment or prevention of psoriasis.

[0226] In some embodiments, bacterial strains from the species M. faecis may provide therapeutic benefits in the treatment or prevention of systemic lupus erythematosus (SLE). In certain embodiments, the compositions of the invention are for use in the treatment or prevention of SLE in a subject. In certain embodiments, the invention provides a composition comprising a bacterial strain of the species M. faecis for use in the treatment or prevention of SLE.

[0227] In some embodiments, bacterial strains from the species M. faecis may provide therapeutic benefits in the treatment or prevention of allograft rejection. In certain embodiments, the compositions of the invention are for use in the treatment or prevention of allograft rejection in a subject. In certain embodiments, the invention provides a composition comprising a bacterial strain of the species M. faecis for use in the treatment or prevention of allograft rejection.

### 6. Formulations

[0228] In some embodiments, the compositions of the invention comprise fewer than 40 different bacterial strains. In some embodiments, the composition comprises fewer than 30 different bacterial strains. In some embodiments, the composition comprises fewer than 20 different bacterial strains. In some embodiments, the composition comprises fewer than 10 different bacterial strains. In some embodiments, the composition comprises fewer than 5 different bacterial strains. In some preferred embodiments, the composition comprises fewer than three different bacterial strains. In some embodiments, the composition does not comprise bacteria of the genus Clostridium.

[0229] The compositions of the invention comprise bacteria (i.e., live bacteria and/or killed bacteria). In preferred embodiments of the invention, the composition is formulated in freeze-dried form. The composition of the invention may comprise granules or gelatin capsules, for example hard gelatin capsules, comprising a bacterial strain of the invention. Preferably, the composition of the invention comprises lyophilised bacteria. Lyophilisation of bacteria is a well-established procedure and relevant guidance is available in, for example, references (Miyamoto-Shinohara, 2008; and Day & Stacey, 2007).

[0230] The composition of the invention may comprise a live, active bacterial culture. The examples demonstrate that cultures of the bacteria of the invention are therapeutically effective.

[0231] In some embodiments, the bacterial strain in the composition of the invention has not been inactivated, for example, has not been heat-inactivated. In some embodiments, the bacterial strain in the composition of the invention has not been killed, for example, has not been heat-killed. In some embodiments, the bacterial strain in the composition of the invention has not been attenuated, for example, has not been heat-attenuated. For example, in some embodiments, the bacterial strain in the composition of the invention has not been killed, inactivated and/or attenuated. For example, in some embodiments, the bacterial strain in the composition of the invention is live. For example, in some embodiments, the bacterial strain in the composition of the invention is viable. For example, in some embodiments, the bacterial strain in the composition of the invention is capable of partially or totally colonising the intestine. For example, in some embodiments, the bacterial strain in the composition of the invention is viable and capable of partially or totally colonising the intestine.

[0232] In some embodiments, the composition comprises a mixture of live bacterial strains and bacterial strains that have been killed. In preferred embodiments, the composition of the invention is encapsulated to enable delivery of the bacterial strain to the intestine. Encapsulation protects the composition from degradation until delivery at the target location through, for example, rupturing with chemical or physical stimuli such as pressure, enzymatic activity, or physical disintegration, which may be triggered by changes in pH. Any appropriate encapsulation method may be used. Exemplary encapsulation techniques include entrapment within a porous matrix, attachment or adsorption on solid carrier surfaces, self-aggregation by flocculation or with cross-linking agents, and mechanical containment behind a microporous membrane or a microcapsule. Guidance on encapsulation that may be useful for preparing compositions of the invention is widely available in the art (for example, in Mitropoulou, 2013; and Kailasapathy, 2002).

[0233] The composition may be administered orally and may be in the form of a tablet, capsule or powder. Encapsulated products are preferred because bacteria of the genus Mediterraneibacter are obligate anaerobes.

[0234] A composition of the invention includes a therapeutically effective amount of a bacterial strain of the invention. A therapeutically effective amount of a bacterial strain is sufficient to exert a beneficial effect upon a patient. A therapeutically effective amount of a bacterial strain may be sufficient to result in delivery to and/or partial or total colonisation of the patient's intestine.

[0235] A suitable daily dose of the bacteria, for example for an adult human, may be from about 1×10³ to about 1×10¹¹ colony forming units (CFU); for example, from about 1×10⁷ to about 1×10¹⁰ CFU; in another example from about 1×10⁶ to about 1×10¹⁰ CFU; in another example from about 1×10⁷ to about 1×10¹¹ CFU; in another example from about 1×10⁸ to about 1×10¹⁰ CFU; in another example from about 1×10⁸ to about 1×10¹¹ CFU.

[0236] In certain embodiments, the dose of the bacteria is at least 10⁹ cells per day, such as at least 10¹⁰, at least 10¹¹, or at least 10¹² cells per day.

[0237] In certain embodiments, a dose of the composition may comprise the bacterial strain in an amount of from about 1×10⁶ to about 1×10¹¹ colony forming units (CFU)/g, respect to the weight of the composition. The dose may be suitable for an adult human. For example, the composition may comprise the bacterial strain from about 1×10³ to about 1×10¹¹ CFU/g; for example, from about 1×10⁷ to about 1×10¹⁰ CFU/g; in another example from about 1×10⁶ to about 1×10¹⁰ CFU/g; in another example from about 1×10⁷ to about 1×10¹¹ CFU/g; in another example from about 1×10⁸ to about 1×10¹⁰ CFU/g; in another example from about 1×10⁸ to about 1×10¹¹ CFU/g, from about 1×10⁸ to about 1×10¹⁰ CFU/g. For example, from about 1×10⁸ to about 1×10¹⁰ CFU/g. The dose may be, for example, 1 g, 3 g, 5 g, and 10 g.

[0238] In some embodiments, the compositions described above and/or elsewhere herein comprise, consist, or consist essentially of an amount of bacterial strain from about 1×10³ to about 1×10¹¹ colony forming units per gram with respect to a weight of the composition.

[0239] In some embodiments, the compositions described above and/or elsewhere herein comprise the bacterial strain at a dose of between 500 mg and 1000 mg, between 600 mg and 900 mg, between 700 mg and 800 mg, between 500 mg and 750 mg or between 750 mg and 1000 mg. In certain embodiments, the invention provides the above pharmaceutical composition, wherein the lyophilised bacteria in the pharmaceutical composition is administered at a dose of between 500 mg and 1000 mg, between 600 mg and 900 mg, between 700 mg and 800 mg, between 500 mg and 750 mg, or between 750 mg and 1000 mg.

[0240] The composition may be formulated as a probiotic. A probiotic is defined by the FAO/WHO as a live microorganism that, when administered in adequate amounts, confers a health benefit on the host.

[0241] Typically, a probiotic, such as the composition of the invention, is optionally combined with at least one suitable prebiotic compound. A prebiotic compound is usually a non-digestible carbohydrate such as an oligosaccharide or polysaccharide, or a sugar alcohol, which is not degraded or absorbed in the upper digestive tract. Known prebiotics include commercial products such as inulin and transgalactoligosaccharides.

[0242] Other prebiotic compounds (such as vitamin C, for example), may be included as oxygen scavengers and to improve the delivery and/or partial or total colonisation and survival in vivo. Alternatively, the probiotic composition of the invention may be administered orally as a food or nutritional product, such as milk or whey based fermented dairy product, or as a pharmaceutical product.

[0243] In certain embodiments, the probiotic composition of the present invention includes a prebiotic compound in an amount of from about 1 to about 30% by weight, respect to the total weight composition (e.g., from 5 to 20% by weight). Known prebiotics include commercial products such as inulin and transgalactoligosaccharides.

[0244] In some embodiments, the prebiotic is a carbohydrate selected from the group comprising or consisting of fructooligosaccharides (or FOS), short-chain fructooligosaccharides, inulin, isomaltoligosaccharides, pectins, xylooligosaccharides (or XOS), chitosanoligosaccharides (or COS), beta-glucans, arable gum modified and resistant starches, polydextrose, D-tagatose, acacia fibers, carob, oats, and citrus fibers. In one aspect, the prebiotics are the short-chain fructooligosaccharides. Short-chain FOS are not digestible carbohydrates, generally obtained by the conversion of the beet sugar and including a saccharose molecule to which three glucose molecules are bonded.

[0245] The compositions of the invention may comprise pharmaceutically acceptable excipients or carriers, such as those described in Handbook of Pharmaceutical Excipients. Acceptable carriers or diluents for therapeutic use are well known in the pharmaceutical art and are described, for example, in Remington's Pharmaceutical Sciences. Examples of suitable carriers include lactose, starch, glucose, methyl cellulose, magnesium stearate, mannitol, sorbitol and the like. Examples of suitable diluents include ethanol, glycerol and water. The choice of pharmaceutical carrier, excipient or diluent can be selected with regard to the intended route of administration and standard pharmaceutical practice. The pharmaceutical compositions may comprise as, or in addition to, the carrier, excipient or diluent one or more suitable binders, lubricants, suspending agents, coating agents, and/or solubilising agents. Examples of suitable binders include starch, gelatin, natural sugars such as glucose, anhydrous lactose, free-flow lactose, R-lactose, corn sweeteners, natural and synthetic gums, such as acacia, tragacanth or sodium alginate, carboxymethyl cellulose and polyethylene glycol. Examples of suitable lubricants include sodium oleate, sodium stearate, magnesium stearate, sodium benzoate, sodium acetate, sodium chloride and the like. Preservatives, stabilizers, dyes and even flavouring agents may be provided in the pharmaceutical composition. Examples of preservatives include sodium benzoate, sorbic acid, cysteine and esters of 4-hydroxybenzoic acid, for example, in some embodiments the preservative is selected from sodium benzoate, sorbic acid and esters of 4-hydroxybenzoic acid. Antioxidants and suspending agents may be also used. A further example of a suitable carrier is saccharose. A further example of a suitable preservative is cysteine.

[0246] The compositions of the invention may be formulated as a food product. For example, a food product may provide nutritional benefit in addition to the therapeutic effect of the invention, such as in a nutritional supplement. Similarly, a food product may be formulated to enhance the taste of the composition of the invention or to make the composition more attractive to consume by being more similar to a common food item, rather than to a pharmaceutical composition. In certain embodiments, the composition of the invention is formulated as a milk-based product. The term “milk-based product” means any liquid or semi-solid milk-based or whey-based product having a varying fat content. The milk-based product can be, e.g., cow's milk, goat's milk, sheep's milk, skimmed milk, whole milk, milk recombined from powdered milk and whey without any processing, or a processed product, such as yoghurt, curdled milk, curd, sour milk, sour whole milk, butter milk and other sour milk products. Alternatively, the milk could be a plant-based milk, including for example, soy milk, oat milk, almond milk, coconut milk, or macadamia milk. Another important group includes milk beverages, such as whey beverages, fermented milks, condensed milks, infant or baby milks; flavoured milks, ice cream; milk-containing food such as sweets.

[0247] In some embodiments, the compositions disclosed herein comprise one or more bacterial strains of the genus Mediterraneibacter and do not contain bacteria from any other species, or which comprise only de minimis or biologically irrelevant amounts of bacteria from another species. Thus, in some embodiments, the invention provides a composition comprising one or more bacterial strains of the genus Mediterraneibacter, which does not contain bacteria from any other species or which comprises only de minimis or biologically irrelevant amounts of bacteria from another species, for use in therapy.

[0248] In some embodiments, the compositions comprise one or more bacterial strains of the genus Mediterraneibacter and do not contain bacteria from any other genus or comprise only de minimis or biologically irrelevant amounts of bacteria from another. In some embodiments, the compositions comprise one or more bacterial strains of the genus Mediterraneibacter and do not contain bacteria from any other genus or comprise only de minimis or biologically irrelevant amounts of bacteria from another.

[0249] In certain embodiments, the compositions disclosed herein contain a single bacterial species and do not contain any other bacterial species. In certain embodiments, the compositions disclosed herein contain a single bacterial strain and do not contain any other bacterial strains. For example, the compositions of the invention may comprise bacteria only of a strain of M. faecis. Such compositions may comprise only de minimis or biologically irrelevant amounts of other bacterial strains or species. Such compositions may be a culture that is substantially free from other species of organism. In some embodiments, such compositions may be a in a dried form and be substantially free from other species of organism.

[0250] In some embodiments, the invention provides a composition comprising a single bacterial strain of the genus Mediterraneibacter which does not contain bacteria from any other strains or which comprises only de minimis or biologically irrelevant amounts of bacteria from another strain for use in therapy.

[0251] In certain embodiments, the compositions of the invention contain a single bacterial strain or species and do not contain any other bacterial strains or species. Such compositions may comprise only de minimis or biologically irrelevant amounts of other bacterial strains or species. Such compositions may be a culture that is substantially free from other species of organism.

[0252] In certain embodiments, the compositions of the invention consist of 1, 2, 3, 4, 5, 6, 7, 8, 9, 10, 11, 12, 13, 14, 15 or 16 bacterial strains or species. In certain embodiments, the compositions consist of from 1 to 10, preferably from 1 to 5 bacterial strains or species. In some embodiments, the compositions disclosed herein comprise more than one strain from within the same species (e.g., more than 1, 2, 3, 4, 5, 6, 7, 8, 9, 10, 15, 20, 25, 30, 35, 40 or 45 strains), and, optionally, do not contain bacteria from any other species. In some embodiments, the compositions disclosed herein comprise less than 50 strains from within the same species (e.g., less than 45, 40, 35, 30, 25, 20, 15, 12, 10, 9, 8, 7, 6, 5, 4 or 3 strains), and, optionally, do not contain bacteria from any other species. In some embodiments, the compositions disclosed herein comprise 1-40, 1-30, 1-20, 1-19, 1-18, 1-15, 1-10, 1-9, 1-8, 1-7, 1-6, 1-5, 1-4, 1-3, 1-2, 2-50, 2-40, 2-30, 2-20, 2-15, 2-10, 2-5, 6-30, 6-15, 16-25, or 31-50 strains from within the same species and, optionally, do not contain bacteria from any other species. In some embodiments, the compositions disclosed herein comprise more than one species from within the same genus (e.g., more than 1, 2, 3, 4, 5, 6, 7, 8, 9, 10, 12, 15, 17, 20, 23, 25, 30, 35 or 40 species), and, optionally, do not contain bacteria from any other genus. In some embodiments, the compositions disclosed herein comprise less than 50 species from within the same genus (e.g., less than 50, 45, 40, 35, 30, 25, 20, 15, 12, 10, 8, 7, 6, 5, 4 or 3 species), and, optionally, do not contain bacteria from any other genus. In some embodiments, the compositions disclosed herein comprise 1-50, 1-40, 1-30, 1-20, 1-15, 1-10, 1-9, 1-8, 1-7, 1-6, 1-5, 1-4, 1-3, 1-2, 2-50, 2-40, 2-30, 2-20, 2-15, 2-10, 2-5, 6-30, 6-15, 16-25, or 31-50 species from within the same genus and, optionally, do not contain bacteria from any other genus. The invention comprises any combination of the foregoing.

[0253] In some embodiments, the compositions of the invention comprise more than one bacterial strain or species. For example, in some embodiments, the compositions of the invention comprise more than one strain from within the same species (e.g., more than 1, 2, 3, 4, 5, 6, 7, 8, 9, 10, 15, 20, 25, 30, 35, 40 or 45 strains), and, optionally, do not contain bacteria from any other species. In some embodiments, the compositions of the invention comprise less than 50 strains from within the same species (e.g., less than 45, 40, 35, 30, 25, 20, 15, 12, 10, 9, 8, 7, 6, 5, 4 or 3 strains), and, optionally, do not contain bacteria from any other species. In some embodiments, the compositions of the invention comprise 1-40, 1-30, 1-20, 1-19, 1-18, 1-15, 1-10, 1-9, 1-8, 1-7, 1-6, 1-5, 1-4, 1-3, 1-2, 2-50, 2-40, 2-30, 2-20, 2-15, 2-10, 2-5, 6-30, 6-15, 16-25, or 31-50 strains from within the same species and, optionally, do not contain bacteria from any other species. In some embodiments, the compositions of the invention comprise more than one species from within the same genus (e.g., more than 1, 2, 3, 4, 5, 6, 7, 8, 9, 10, 12, 15, 17, 20, 23, 25, 30, 35 or 40 species), and, optionally, do not contain bacteria from any other genus. In some embodiments, the compositions of the invention comprise less than 50 species from within the same genus (e.g., less than 50, 45, 40, 35, 30, 25, 20, 15, 12, 10, 8, 7, 6, 5, 4 or 3 species), and, optionally, do not contain bacteria from any other genus. In some embodiments, the compositions of the invention comprise 1-50, 1-40, 1-30, 1-20, 1-15, 1-10, 1-9, 1-8, 1-7, 1-6, 1-5, 1-4, 1-3, 1-2, 2-50, 2-40, 2-30, 2-20, 2-15, 2-10, 2-5, 6-30, 6-15, 16-25, or 31-50 strains from within the same genus and, optionally, do not contain bacteria from any other genus. The invention comprises any combination of the foregoing.

[0254] In certain embodiments, the pharmaceutical composition of the invention comprises between 1-50 distinct bacterial strains, such as between 1-50, 1-40, 1-30, 1-20, 1-19, 1-18, 1-17, 1-16, 1-15, 1-14, 1-13, 1-12, 1-11, 1-10, 1-9, 1-8, 1-7, 1-6, 1-5, 1-4, 1-3 or 2 distinct bacterial strains. In certain embodiments, the pharmaceutical composition of the invention comprises between 1-50 distinct bacterial strains, such as between 1-50, 1-40, 1-30, 1-20, 1-19, 1-18, 1-17, 1-16, 1-15, 1-14, 1-13, 1-12, 1-11, 1-10, 1-9, 1-8, 1-7, 1-6, 1-5, 1-4, 1-3 or 2 distinct bacterial strains.

[0255] In some embodiments, the composition of the invention additionally comprises a bacterial strain that has the same safety and therapeutic efficacy characteristics as any one of strains V21/006223, V21/006224, V21/006225, or V21/006226.

[0256] In some embodiments in which the composition of the invention comprises more than one bacterial strain, species or genus, the individual bacterial strains, species or genera may be for separate, simultaneous or sequential administration. For example, the composition may comprise all of the more than one bacterial strain, species or genera, or the bacterial strains, species or genera may be stored separately and be administered separately, simultaneously or sequentially. In some embodiments, the more than one bacterial strains, species or genera are stored separately but are mixed together prior to use.

[0257] Preferably, the compositions disclosed herein are to be administered to the gastrointestinal (GI) tract in order to enable delivery to, and/or partial or total colonisation of, the intestine with the bacterial strain of the invention. In other words, the bacteria may colonise some or all of the GI tract and such colonisation may be transient or permanent. More specifically, the phrase “total colonisation of the intestine” means that bacteria have colonised all parts of the intestine (i.e., the small intestine, large intestine and rectum). Additionally or alternatively, the term “total colonisation” means that the bacteria engraft permanently in some or all parts of the intestine.

[0258] Similarly, the phrase “partial colonisation of the intestine” means that bacteria have colonised some but not all parts of the intestine. Additionally or alternatively, the term “partial colonisation” means that the bacteria engraft transiently in some or all parts of the intestine.

[0259] The transience of engraftment of bacteria can be determined by assessing (e.g., in a fecal sample) the abundance of the bacterial strain of the invention periodically (e.g., daily or weekly) following the end of a dosing interval to determine the washout period, i.e., the period between conclusion of the dosing interval and there being no detectable levels of the bacterial strain of the invention present. In some embodiments, the washout period is 14 days or less, 12 days or less, 10 days or less, 7 days or less, 4 days or less, 3 days or less, 2 days or less, or 1 day or less.

[0260] In some embodiments, the bacteria described above or elsewhere herein engraft transiently in the large intestine.

[0261] In some embodiments, the bacterial strains of the invention are obtained from human adult faeces. In some embodiments in which the composition of the invention comprises more than one bacterial strain, all of the bacterial strains are obtained from human adult faeces or if other bacterial strains are present they are present only in de minimis amounts. The bacteria may have been cultured subsequent to being obtained from these human adult faeces and being used in a composition of the invention.

[0262] In some embodiments, the one or more Mediterraneibacter bacterial strain is/are the only therapeutically active agents in a composition of the invention. In some embodiments, the bacterial strains in the composition is/are the only therapeutically active agents in a composition of the invention.

[0263] The compositions for use in accordance with the invention may or may not require marketing approval.

[0264] In certain embodiments, the invention provides the above pharmaceutical composition, wherein said bacterial strain is in a dried form. In some cases, the bacterial strain is reconstituted prior to administration. In some cases, the reconstitution is by use of a diluent described herein. In certain embodiments, the invention provides the above pharmaceutical composition, wherein said bacterial strain is spray dried. In certain embodiments, the invention provides the above pharmaceutical composition, wherein the bacterial strain is lyophilised or spray dried and wherein it is live. In certain embodiments, the invention provides the above pharmaceutical composition, wherein the bacterial strain is lyophilised or spray dried and wherein it is viable. In certain embodiments, the invention provides the above pharmaceutical composition, wherein the bacterial strain is lyophilised or spray dried and wherein it is capable of partially or totally colonising the intestine. In certain embodiments, the invention provides the above pharmaceutical composition, wherein the bacterial strain is dried (e.g., lyophilised or spray dried) and wherein it is viable and capable of partially or totally colonising the intestine. In some of the same embodiments and some alternative embodiments, the bacterial strain transiently colonises the intestine.

[0265] In some cases, the lyophilised or spray dried bacterial strain is reconstituted prior to administration. In some cases, the reconstitution is by use of a diluent described herein.

[0266] The compositions of the invention can comprise pharmaceutically acceptable excipients, diluents or carriers.

[0267] In certain embodiments, the invention provides a pharmaceutical composition comprising: a bacterial strain of the invention; and a pharmaceutically acceptable excipient, carrier or diluent; wherein the bacterial strain is in an amount sufficient to treat or prevent an inflammatory or autoimmune disorder when administered to a subject in need thereof. In some preferred embodiments, the inflammatory or autoimmune disorder is selected from the group comprising: an inflammatory bowel disease (such as Crohn's disease or ulcerative colitis); asthma (such as allergic asthma or neutrophilic asthma); arthritis (such as rheumatoid arthritis, osteoarthritis, psoriatic arthritis, or juvenile idiopathic arthritis); fatty liver disease (such as nonalcoholic fatty liver disease (NAFLD)); ankylosing spondylitis; psoriasis; systemic lupus erythematosus (SLE); scleroderma; Sjogren's syndrome; vasculitis; type 1 diabetes mellitus.

[0268] In certain embodiments, the invention provides pharmaceutical composition comprising: a bacterial strain of the invention; and a pharmaceutically acceptable excipient, carrier or diluent; wherein the bacterial strain is in an amount sufficient to treat or prevent an inflammatory or autoimmune disorder mediated by the STAT3 signalling pathway. In preferred embodiments, said disorder is selected from the group consisting of an inflammatory bowel disease (such as Crohn's disease or ulcerative colitis); asthma (such as allergic asthma or neutrophilic asthma); arthritis (such as rheumatoid arthritis, osteoarthritis, psoriatic arthritis, or juvenile idiopathic arthritis); fatty liver disease (such as nonalcoholic fatty liver disease (NAFLD)); ankylosing spondylitis; psoriasis; systemic lupus erythematosus (SLE); scleroderma; Sjogren's syndrome; vasculitis; type 1 diabetes mellitus.

[0269] In certain embodiments, the invention provides the above pharmaceutical composition, wherein the amount of the bacterial strain is from about 1×10³ to about 1×10¹¹ colony forming units (CFU) per gram with respect to a weight of the composition.

[0270] In certain embodiments, the invention provides the above pharmaceutical composition, wherein the composition is administered at a dose of 1 g, 3 g, 5 g or 10 g.

[0271] In certain embodiments, the invention provides the above pharmaceutical composition, wherein the composition is administered by a method selected from the group consisting of oral, rectal, subcutaneous, nasal, buccal, and sublingual.

[0272] In certain embodiments, the invention provides the above pharmaceutical composition, comprising a carrier selected from the group consisting of lactose, starch, glucose, methyl cellulose, magnesium stearate, mannitol and sorbitol.

[0273] In certain embodiments, the invention provides the above pharmaceutical composition, comprising a diluent selected from the group consisting of ethanol, glycerol and water.

[0274] In certain embodiments, the invention provides the above pharmaceutical composition, comprising an excipient selected from the group consisting of starch, gelatin, glucose, anhydrous lactose, free-flow lactose, beta-lactose, corn sweetener, acacia, tragacanth, sodium alginate, carboxymethyl cellulose, polyethylene glycol, sodium oleate, sodium stearate, magnesium stearate, sodium benzoate, sodium acetate and sodium chloride.

[0275] In certain embodiments, the invention provides the above pharmaceutical composition, further comprising at least one of a preservative, an antioxidant and a stabilizer.

[0276] In certain embodiments, the invention provides the above pharmaceutical composition, comprising a preservative selected from the group consisting of sodium benzoate, sorbic acid and esters of 4-hydroxybenzoic acid.

[0277] In certain embodiments, the invention provides the above pharmaceutical composition, wherein said bacterial strain is in a dried form (e.g., lyophilized, spray dried, fluidized bed dried, etc.).

[0278] In certain embodiments, the invention provides the above pharmaceutical composition, wherein when the composition is stored in a sealed container at about 4° C. or about 25° C. and the container is placed in an atmosphere having 50% relative humidity, at least 80% of the bacterial strain as measured in colony forming units, remains after a period of at least about: 1 month, 3 months, 6 months, 1 year, 1.5 years, 2 years, 2.5 years or 3 years.

[0279] In some embodiments, the composition of the invention is provided in a sealed container comprising a composition as described herein. In some embodiments, the sealed container is a sachet or bottle. In some embodiments, the composition of the invention is provided in a syringe comprising a composition as described herein.

[0280] The composition of the present invention may, in some embodiments, be provided as a pharmaceutical formulation. For example, the composition may be provided as a tablet or capsule. In some embodiments, the capsule is a gelatine capsule (“gel-cap”). The capsule can be a hard or a soft capsule. In some embodiments, the formulation is a soft capsule. Soft capsules are capsules which may, owing to additions of softeners, such as, for example, glycerol, sorbitol, maltitol and polyethylene glycols, present in the capsule shell, have a certain elasticity and softness. Soft capsules can be produced, for example, on the basis of gelatine or starch. Gelatine-based soft capsules are commercially available from various suppliers. Depending on the method of administration, such as, for example, orally or rectally, soft capsules can have various shapes, they can be, for example, round, oval, oblong or torpedo-shaped. Soft capsules can be produced by conventional processes, such as, for example, by the Scherer process, the Accogel process or the droplet or blowing process.

[0281] In some embodiments, the compositions disclosed herein are administered orally. Oral administration may involve swallowing, so that the compound enters the GI tract.

[0282] Pharmaceutical formulations suitable for oral administration include solid plugs, solid microparticulates, semi-solid and liquid (including multiple phases or dispersed systems) such as tablets; soft or hard capsules containing multi- or nano-particulates, liquids (e.g., aqueous solutions), emulsions or powders; lozenges (including liquid-filled); chews; gels; fast dispersing dosage forms; films; ovules; sprays; and buccal/mucoadhesive patches.

[0283] In some embodiments the pharmaceutical formulation is an enteric formulation, i.e., a gastro-resistant formulation (for example, resistant to gastric pH) that is suitable for delivery of the composition of the invention to the intestine by oral administration. Enteric formulations may be particularly useful when the bacteria or another component of the composition is acid-sensitive (e.g., prone to degradation under gastric conditions).

[0284] In some embodiments, the enteric formulation comprises an enteric coating. In some embodiments, the formulation is an enteric-coated dosage form. For example, the formulation may be an enteric-coated tablet or an enteric-coated capsule, or the like. The enteric coating may be a conventional enteric coating, for example, a conventional coating for a tablet, capsule, or the like for oral delivery. The formulation may comprise a film coating, for example, a thin film layer of an enteric polymer (e.g., an acid-insoluble polymer).

[0285] In some embodiments, the enteric formulation is intrinsically enteric, for example, gastro-resistant without the need for an enteric coating. Thus, in some embodiments, the formulation is an enteric formulation that does not comprise an enteric coating. In some embodiments, the formulation is a capsule made from a thermogelling material. In some embodiments, the thermogelling material is a cellulosic material, such as methylcellulose, hydroxymethylcellulose or hydroxypropylmethylcellulose (HPMC). In some embodiments, the capsule comprises a shell that does not contain any film forming polymer. In some embodiments, the capsule comprises a shell and the shell comprises hydroxypropylmethylcellulose and does not comprise any film-forming polymer (as described in United States Patent Publication No. 2016/0067188). In some embodiments, the formulation is an intrinsically enteric capsule (for example, VCAPS® from Capsugel).

[0286] In some embodiments, the composition is a probiotic or a medical food comprising a bacterial strain of M. faecis. The bacteria can be administered, for instance, as a probiotic, as a capsule, tablet, caplet, pill, troche, lozenge, power, and/or granule. This strain can also be formulated as a nutraceutical, conventional food, medical food, or drug. The bacteria can also be administered as part of a fecal transplant or via suppository. In some embodiments, the composition is formulated for delivery to the gut, as described further herein, in some embodiments had the composition further comprise a prebiotic.

6.1 Co-Administering with Additional Agents

[0287] In some embodiments, the methods described herein can further comprise co-administering a second agent and/or treatment to the subject (e.g., as part of a therapy). The combination therapy, where employed, an be tailored to the particular indication. For example, where a strain of the species M. faecis is administered to treat an inflammatory disorder (e.g., an inflammatory bowel disease), it can be administered in combination with an anti-inflammatory agent or therapy as known in the art of approved for clinical treatment of an inflammatory disorder. Other indications can be similarly treated with, for example, strains of the species M. faecis as described herein in combination with agents known in the art or approved for the clinical treatment of those indications.

[0288] Suitable anti-inflammatory agents that could be used in the treatment of an inflammatory bowel disease include, but not necessarily limited are, the group comprising 5-aminosaliculates, corticosteroids, azathioprine, infliximab, and adalimumab.

[0289] The present invention also includes the compositions as described above, further comprising an anti-inflammatory agent. Such compositions can optionally be in the form of a single composition, or alternatively, two of more separate compositions.

### 7. Screening Methods

[0290] The invention also includes methods of identifying bacterial strains that are suitable for use in the methods of the present invention. Such methods typically include screening for a bacterial strain with a particular functional activity. Suitable assays include those described in the below examples, but any assay for measuring gut barrier function, mucosal healing, NFkB suppression, or inhibition of STAT3 signalling are equally as applicable.

[0291] In some embodiments, the screening method identifies the ability of a bacterial strain of Mediterraneibacter to inhibit or suppress STAT3 signalling pathway. By way of an illustrative example, the invention provides a method of blocking or otherwise inhibiting the activation of STAT3 signalling in a target cell, the method comprising contacting the target cell with at least a soluble component of a bacterial cell preparation of the species Mediterraneibacter faecis, to block or otherwise inhibit the activation of STAT3 signalling in the target cell.

[0292] In some embodiments of this type, the target cell is selected from the group comprising screening a bacterial strain for a functional aca reporter cell (e.g., a HEK cell), an immune cell (e.g., a Th17 immune cell), an epithelial cell, and an endothelial cell.

[0293] In some embodiments, the bacterial cell preparation comprises a bacterial cell culture. Suitably, the soluble component may comprise the supernatant of the bacterial cell culture. In some embodiments of this type, the soluble component is substantially depleted of bacterial cells.

[0294] In some alternative embodiments, the bacterial cell preparation comprises a bacterial cell pellet. Preferably, the bacterial cells of the cell pellet are lysed by any means known in the art. After cell lysis, it is typical for the cell lysate soluble fraction to be separated from the insoluble fraction. The cell lysate may be subject to further processing before being during the screening assay. (e.g., diluted in a buffer), or exposed to a processing reagent.

### 8. Modes of Administration

[0295] Preferably, the compositions of the invention are to be administered to the GI tract in order to enable delivery to the intestine with the bacterial strain of the invention. referable, the compositions of the invention are formulated to be administered to the GI tract in order to enable delivery to the intestine with the bacterial strain of the invention. In some embodiments the compositions of the invention are formulated to be administered to the GI tract in order to enable delivery to, and partial or total colonization of, the intestine with the bacterial strain of the invention.

[0296] In certain embodiments, the compositions of the invention may be 35 administered as a foam, as a spray or a gel.

[0297] In certain embodiments, the compositions of the invention may be administered as a suppository, such as a rectal suppository, for example in the form of a Theobroma oil (cocoa butter), synthetic hard fat (e.g., Suppocire®, WITEPSOL), glycerogelatin, polyethylene glycol, or soap glycerin composition.

[0298] In certain embodiments, the compositions of the invention are administered to the GI tract via a tube, such as a nasogastric tube, orogastric tube, gastric tube, jejunostomy tube (J-tube), percutaneous endoscopic gastrostomy (PEG), or a port, such as a chest wall port that provides access to the stomach, jejunum and other suitable access ports.

[0299] The compositions of the invention may be administered once, or they may be administered sequentially as part of a treatment regimen. In certain embodiments, the compositions of the invention are to be administered daily (either once or several times). In certain embodiments, the compositions disclosed herein are administered regularly, such as daily, every two days, or weekly, for an extended period of time, such as for at least one week, two weeks, one month, two months, six months, or one year.

[0300] In some embodiments, the compositions disclosed herein are administered for 7 days, 14 days, 16 days, 21 days or 28 days or no more than 7 days, 14 days, 16 days, 21 days, or 28 days. For example, in some embodiments the compositions disclosed herein are administered for 16 days.

[0301] In certain embodiments of the invention, treatment according to the invention is accompanied by assessment of the patient's gut microbiota. Treatment may be repeated if delivery of and/or partial or total colonisation with the strain of the invention is not achieved such that efficacy is not observed, or treatment may be ceased if delivery and/or partial or total colonisation is successful and efficacy is observed.

[0302] In certain embodiments, the composition of the invention may be administered to a pregnant animal, for example a mammal such as a human in order to prevent an inflammatory or autoimmune disorder (such as those disclosed herein) developing in her child in utero and/or after it is born.

[0303] The compositions of the invention may be administered to a patient that has been diagnosed with: a disease or condition mediated by the STAT3 signalling pathway, or that has been identified as being at risk of a disease or condition mediated by the STAT3 signalling pathway; or an inflammatory or autoimmune disorder (such as those disclosed herein). The compositions may also be administered as a prophylactic measure to prevent the development of diseases or conditions mediated by the STAT3 signalling pathway in a healthy patient.

[0304] The compositions disclosed herein may be administered to a patient that has been diagnosed with an inflammatory or autoimmune disorder, in particular an inflammatory or autoimmune disorder mediated by the microbiota-gut axis, or that has been identified as being at risk of an inflammatory or autoimmune disorder, in particular an inflammatory or autoimmune disorder mediated by the microbiota-gut axis. The compositions may also be administered as a prophylactic measure to prevent the development of inflammatory or autoimmune disorders, in particular inflammatory or autoimmune disorders mediated by the microbiota-gut axis in a healthy patient.

[0305] The compositions of the invention may be administered to a patient that has been identified as having an abnormal gut microbiota. For example, the patient may have reduced or absent colonisation by Mediterraneibacter, in particular M. faecis.

[0306] The compositions of the invention may be administered as a food product, such as a nutritional supplement.

[0307] Generally, the compositions of the invention are for the prevention or treatment of human diseases, although they may be used to treat animals including monogastric mammals such as poultry, pigs, cats, dogs, horses or rabbits. The compositions of the invention may be useful for enhancing the growth and performance of animals. If administered to animals, oral gavage may be used.

[0308] In some embodiments, the subject to whom the composition is to be administered is an adult human. In some embodiments, the subject to whom the composition is to be administered is an infant human.

### 9. Culturing Methods

[0309] The bacterial strains for use in the present invention can be cultured using standard microbiology techniques as detailed in, for example, references (Handbook of Microbiological Media, 2010; Hunter-Cevera, 1996).

[0310] The solid or liquid medium used for culture may, for example, be selected from TY or PYG medium.

[0311] Illustrative media formulations that are suitable for use with the present invention include those provided in Table 1.

TABLE 1
Culture Media Formulations

| | TY | | PYG | | YG/V | |
|---|---|---|---|---|---|---|
| Tryptone | 10 | g | 20 | g | — | |
| Vegetable tryptone | | | | | 20 | g |
| Yeast extract | 2.5 | g | Tabffff10 g | | 10 | g |
| Glucose | 4 | g | 10 | g | 10 | g |
| Cellobiose | 1 | g | — | | — | |
| Maltose | 1 | g | — | | — | |
| Hemin solution | 10 | mL | 1 | mL | — | |
| Acetic acid | 1.9 | mL | — | | — | |
| Salts 2* | 38 | mL | 38 | mL | 38 | g |
| Salt 3* | 38 | mL | 38 | mL | 38 | g |
| Sodium bicarbonate | 8 | g | 8 | g | 8 | g |
| Resazurin | 1 | mL | 1 | mL | 1 | mL |
| Cysteine | 1 | g | 1 | g | 1 | g |

| | | | |
|---|---|---|---|
| Water | to 1000 mL | to 1000 mL | to 1000 mL |

*Salts 2: K₂HPO₄ 6 g/L
*Salts 3: KH₂PO₄ 6 g/L, (NH₄)2SO₄ 6 g/L, NaCl 12 g/L, MgSO₄•7H₂O 2.5 g/L, CaCl₂•2H₂O 1.6 g/L
Resazurin Stock 1000x (0.1%): 100 mg in 100 mL H₂O. See McSweeney et al. for further recipe details.

[0312] In order that the invention may be readily understood and put into practical effect, particular preferred embodiments will now be described by way of the following non-limiting experimental examples.

### EXAMPLES

[0313] Mediterraneibacter Association with Health, IBD and Other Diseases

[0314] Inflammatory bowel disease is characterised by structure-function changes to the microbiome with a significant reduction in both the prevalence and abundance of select gut bacteria in the IBD gut when compared to the healthy gut. Several studies have shown that these bacteria may modulate IBD pathogenesis (Mallone et al., 2011; and Sokol et al., 2008) however a key obstacle to using these bacteria to develop new therapeutics has been that low resolution 16S rRNA based profiling does not provide sufficient resolution to accurately discriminate against health and IBD associated strains at a low taxonomic level (i.e., genus, species, strain).

[0315] Using the Microba Discovery Database (MDD), which contains high resolution gut metagenomic data and associated host metadata for >8,000 subjects, we identified M. faecis and M. lactaris as a being prevalent in healthy humans but rarely detected in inflammatory and autoimmune diseases (FIG. 2, and Table 2). The strongest effect was observed for IBD, including both major subtypes ulcerative colitis and Crohn's disease (FIG. 2).

TABLE 2
M. faecis/M. lactaris Associations With Disorders

| | P-value | P-value |
|---|---|---|
| Disorder | M. faecis | M. lactaris |
| Asthma | 1.10 × 10⁻⁵ | 0.00094 |
| Autoimmune conditions affecting the | 6.50 × 10⁻⁵ | 0.00078 |
| joints (e.g., ankylosing spondylitis) | | |
| Psoriatic arthritis | 4.60 × 10⁻⁵ | 0.0013 |
| Rheumatoid arthritis | 2.90 × 10⁻⁵ | 0.0065 |
| Fatty live | 4.50 × 10⁻⁵ | 1.50 × 10⁻⁷ |
| IBD | 1.90 × 10⁻⁵ | 2.40 × 10⁻⁸ |
| Crohn's disease | 2.50 × 10⁻⁵ | 4.70 × 10⁻⁶ |
| Ulcerative colitis | 2.40 × 10⁻⁵ | 5.80 × 10⁻⁵ |
| Non-alcohol fatty liver disease | 0.022 | 0.038 |
| Systemic autoimmune disease (e.g., | 6.40 × 10⁻⁵ | 0.018 |
| lupus, scerloderma, Sjogren's | | |
| syndrome, vasculitis) | | |

Isolation and Genome-Scale Analysis of M. faecis.

[0316] The four MH23 isolates place within the Mediterraneibacter genus, which combines several previously characterised isolates on the basis of average nucleotide identity (Togo et al., 2018). The phylogeny and functional potential of M. faecis was examined using high-quality publicly available genomes of Mediterraneibacter sp. from the Genome Taxonomy Database (GTDB; gtdb.ecogenomic.org (FIG. 3). M. faecis is currently the best represented species of the genus Mediterraneibacter with 40 high quality genomes and MAGs available at GTDB. It forms a distinct cluster with Mediterraneibacter lactaris and is separate from Mediterraneibacter torques and several other uncultured species (FIG. 3A). Interestingly, the M. faecis genomes cluster into two clades indicating this species is split into two subgroups. Metabolic reconstruction of M. faecis genomes revealed the ability to produce the short chain fatty acids propionate, lactate, acetate, and formate, but not butyrate (Table 3). A diverse profile of CAZymes were shared among the isolates suggesting a key role in fibre degradation. M. faecis is also predicted to use a wide range of monosaccharides as carbon sources (Table 3), including rhamnose which is relatively rare in the human gut microbiome. Interestingly, M. faecis is also predicted to synthesise selenocysteine in addition to the remaining 20 proteinogenic amino acids.

TABLE 3
Metabolic Reconstruction Analysis of SCFA Production

| | M. faecis | | | |
|---|---|---|---|---|
| SCFA | MH23-1 | MH23-2 | MH23-3 | MH23-4 |
| Formate | + | + | + | + |
| Acetate | + | + | + | + |
| Propionate | + | + | + | + |
| Butyrate | − | − | − | − |
| Isobutyrate | − | − | − | − |
| Valerate | − | − | − | − |
| Isovalerate | − | − | − | − |
| 2-Methylbutanoate | − | − | − | − |
| Lactate | + | + | + | + |

TABLE 4
Predictive Saccharide Carbon Sources of M. faecis Strains

| | | M. faecis strain | | | |
|---|---|---|---|---|---|
| | | 1 | 2 | 3 | 4 |
| Monosaccharides | Glucose | + | + | + | + |
| | L-Rhamnose | + | + | + | + |
| | Fructose | + | + | + | + |
| | D-Galactose | + | + | + | + |
| | D-Gluconate | + | + | + | + |
| | N-Acetylglucosamine | + | + | + | + |
| | D-Galacturonate | − | − | − | + |
| Disaccharides | Trehalose | + | + | + | + |
| | Lactose | + | + | + | + |
| | Melibiose | + | + | + | + |
| | Sucrose | + | + | + | + |
| | D-Mannopyranosyl-N- | − | − | − | + |
| | acetyl-D-glucosamine | | | | |
| | Laminaribiose degradation | − | − | + | + |
| Polysaccharides | Starch | + | + | + | + |
| | Glycogen | + | + | + | + |

[0317] To better understand the role of M. faecis in health and the pathogenesis of IBD, four new strains, termed M. faecis MH23-1, MH23-2, MH23-3, and MH23-4, were isolated from three healthy human donors by generating dilution-to-extinction enrichments and then plating for single colonies. All strains grew well on TY and PYG medium and were observed as Gram positive and occasionally Gram variable staining chain-forming cocci (FIG. 3B). Comparative genomic analyses revealed that the M. faecis MH23 strains clustered with high confidence (100% bootstrap support) within the M. faecis species. Both M. faecis MH23-1 and MH23-2 are highly similar with minor differences in gene composition and synteny suggesting a shared evolutionary history. In contrast, both M. faecis MH23-3 and MH23-4 differed from each other and both M. faecis MH23-1 and MH23-2 (FIG. 3A). M. faecis MH23-1, MH23-2 and MH23-3 were affiliated with cluster 1 while M. faecis MH23-4 was affiliated with cluster 2. As expected, the isolates were predicted to utilise glucose, fructose and N-acetylglucosamine which was consistent with the enrichment media used. All M. faecis MH23 isolates were predicted to produce B12 a relatively rare feature among the Firmicutes (Shelton et al., 2019).

M. faecis MH23-1 Improves Out Barrier Function In Vivo.

[0318] To assess the role of M. faecis in the healthy gut, naïve C57Bl/6 SPF mice were treated for 8 days with M. faecis MH23-1 (FIG. 4A). During this treatment period, no morbidity or change in general appearance, behaviour, posture, mobility and neurological behaviour was observed. Similarly, there was no significant change in body weight in M. faecis MH23-1 treated animals relative to the vehicle control; colon length and weight/length ratio were also unaffected (FIGS. 4B-4D). M. faecis MH23-1 did not result in any significant histological changes in the colon when compared to the vehicle as determined by assessing epithelial injury, inflammation and hypervascularization alone, or as a combined histopathological score (FIGS. 4E-4H).

[0319] The therapeutic efficacy of M. faecis MH23-1 in an acute murine model of DSS-induced gut barrier dysfunction was examined, with prednisone and F. prausnitzii A2-165 as positive controls (FIG. 5A). DSS treatment resulted in significant gut barrier dysfunction relative to the vehicle control. Furthermore, there was a significant reduction in body weight (FIG. 5B) which has been shown to be an accurate and reliable indicator of gut barrier function (Britto et al., 2019). As expected, prednisone exacerbated the DSS induced weight loss (Yamamoto et al., 2013), however DSS-induced weight loss was ameliorated by treatment with M. faecis MH23-1 or F. prausnitzii A2-165 (FIG. 5B). Endoscopic analysis revealed a progressive increase in disease activity at day 2 and day 6 in all treatment groups, from baseline at day 1. However, treatment with F. prausnitzii A2-165 or M. faecis MH23-1 resulted in a significant reduction in disease activity relative to the vehicle treatment group (FIG. 5C).

[0320] Histological analysis of DSS-treated mice revealed significant gut damage characterised by crypt loss, epithelial erosion and ulceration. Notably, treatment with M. faecis MH23-1 resulted in significant improvement in pathology characterised by crypt re-formation and re-epithelisation (FIG. 5D) as evidenced by improvements in histopathological healing (FIG. 5D,E), epithelial injury and inflammation score (FIG. 5E-G). Consistent with this, treatment with M. faecis MH23-1 resulted in decreased gut inflammation as determined by lipocalin-2 in faeces (FIG. 5H). Histological analyses revealed an increase in epithelial goblet cells following M. faecis MH23-1 treatment (FIG. 5I) and this was associated by an increase in mucin production relative to the DSS treated control as determined by Alcian blue staining (FIG. 5J). As expected, prednisone and F. prausnitzii A2-165 also resulted in a significant improvement in disease pathology

[0321] Taken together, these data reveal that M. faecis MH23-1 did not cause any adverse effects in DSS treated or naïve mice, and that M. faecis MH23-1 promoted an improvement in gut barrier function and mucosal healing in as little as two days after the final DSS administration.

[0322] The inventors also examined the efficacy of M. faecis MH23-3 in a therapeutic model of DSS induced murine colits (FIG. 5K). Endoscopic analysis revealed treatment with prednisone or M. faecis MH23-1 resulted in a significant reduction in disease activity relative to the vehicle treatment group (FIG. 5L). Histological analysis of DSS-treated mice revealed significant gut damage characterised by crypt loss, epithelial erosion and ulceration. Notably, treatment with M. faecis MH23-3 resulted in significant improvement in pathology characterised by crypt re-formation and re-epithelisation as evidenced by improvements in histopathological healing, epithelial injury and inflammation score (FIG. 5M-0). Consistent with this, treatment with M. faecis MH23-3 resulted in decreased gut inflammation as determined by lipocalin-2 in faeces (FIG. 5P)

[0323] The therapeutic efficacy of M. faecis MH23-3 in an acute murine model of TNBS-induced colitis was also examined, with cyclosporine A as a positive control (FIG. 5Q). TNBS treatment resulted in significant histological damage that was ameliorated by treatment with cyclosporine A or M. faecis MH23-3 (FIG. 5R-S).

M. faecis Suppresses STAT3 and NF-κB Activation In Vitro.

[0324] Given the dramatic effects on histological inflammation and re-epithelialisation observed in the DSS treated animals, the present inventors next examined the ability of M. faecis to modulate IBD associated immune pathways. IL-23 driven immune responses are central to the pathogenesis of IBD and are a clinically recognised target (Britto et al., 2019; and Yamamoto et al., 2013). The ability of M. faecis MH23-1, MH23-3 and MH23-4 to suppress IL-23 mediated activation of STAT3 was examined using the HEK-Blue™ IL-23 reporter cell line. The HEK-Blue™ IL-23 reporter cell line carries a STAT3 inducible SEAP reporter gene that is responsive to IL-23 stimulation. As expected, IL-23 mediated activation of STAT3 could be prevented by tofacitinib (FIG. 6A-C). Cell free culture supernatant prepared from M. faecis MH23-1, MH23-3, and MH23-4 grown in TY medium suppressed SEAP reporter activity (FIG. 6A-C). No cytotoxic effects were observed following treatment with M. faecis culture supernatants. The present inventors assessed the biochemical characteristics of the culture supernatant (CS) by size fractionation, heat treatment and proteinase K treatment. By this approach, it was determined that the STAT3 suppressive activity of M. faecis was associated with the <3 kDa fraction and it was unaffected by heat treatment (FIG. 6D-F).

[0325] Finally, we examined the impact of growth medium dependent effects on IL-23 mediated STAT3 activation. CS prepared from strains grown in TY or PYG medium exhibited potent STAT3 suppressive activities. There was minimal STAT3 suppressive activity when the strains were grown in BHI, Wilkins-Chalgren medium (WCB) or MCM (FIG. 7G). This is consistent with previous reports on the influence of nutritional factors in culture impacting on activity for other bacterial species (e.g., Giri et al., 2019; and Toshimitsu et al., 2017). These results therefore suggest, that the production of immunomodulatory bioactives by M. faecis can be enhanced by select nutritional factors, as previously described for other bacterial species (Wlodarska et al., 2017; Zelante et al., 2013).

[0326] The ability of M. faecis MH23-1 and MH23-2 to prevent NF-κB activation was examined by assessing IL-8 secretion in the human gut epithelial HCT116 cell line (Kunsch et al., 1993). IL-8 expression is NF-κB regulated (Zhu et al., 2021) and as expected, treatment of HCT116 cells with IL-1p resulted in a significant increase in IL-8 secretion that could be prevented using the pharmacological inhibitor indole-3-carbinol (FIG. 7A). Notably, cell free CS from M. faecis MH23-1 suppressed IL-8 secretion relative to the medium control (FIG. 7A). Additionally, the ability of M. faecis MH23-4 to suppress NF-κB activity was tested by assessing the expression of TNF in human monocyte-derived macrophages. THP-1 cells were co-stimulated with LPS and cell free culture supernatant from M. faecis MH23-4. Both M. faecis MH23-4 and F. prausnitzii A2-165 were able to suppress the expression of TNF (FIG. 7B). In contrast, cell free CS prepared from Clostridium bolteae BAA-613 (a representative strain from an IBD-associated species (Lloyd-Price, 2019)) did not suppress TNF expression further underlying the substantial anti-inflammatory activity of M. faecis. Taken together, this revealed that M. faecis modulates activation of key pathways underpinning the IBD inflammatory response.

M. faecis Modulates GPCR Activity.

[0327] To better understand the ability of M. faecis to induce mucosal healing, the immunomodulatory capacities of M. faecis MH23-1 and MH23-2 were assessed using the high-throughput gpcrMAX℠ GPCR Assay Panel and SelectScreen Cell-based Pathway Profiling assays. The gpcrMAX℠ and SelectScreen assays are comprised of 168 and 38 pathways, respectively. To minimise the number of samples to be screened, a crude metabolite extract was prepared using a method adapted from Colosimo et al. (Colosimo et al., 2019) to extract low molecular weight non-polar metabolites. Uninoculated control medium was similarly prepared, and each sample was assayed in agonist and antagonist mode and confident hits identified using the criteria outlined by Eurofins. In the first pass screens, M. faecis MH23-1 and MH23-2 induced β-arrestin recruitment above the threshold level and differed significantly from the medium control. In particular, M. faecis MH23-1 and MH23-2 exhibited agonist activities against the GPCRs FPR1 and HTR2C, which are receptors for N-formylated peptides and tryptamine respectively, relative to the control medium. In addition, both strains exhibited antagonist activities against dopamine mediated activation of DRD2S, while M. faecis MH23-1 additionally exhibited antagonist activities against isoproterenol mediated activation of ADRB1 and dopamine mediated activation of DRD3. As crude metabolite extracts could reduce the sensitivity of the assays (e.g., Colosimo et al., 2019), hits that did not meet the stringent threshold but that differed from the medium control were also examined. From this extended list, several other GPCRs that are potentially modulated by M. faecis were identified. High and medium confidence hits were subsequently assessed with biological replicate cultures and confirmed that M. faecis strains MH23-1 and MH23-2 both activated FRP1 at the medium confidence threshold and that M. faecis MH23-1 additionally activated HTR2C (FIG. 7). Similarly, M. faecis MH23-2 exhibited antagonist activities against melanotan II mediated activation of MC1R and GIP mediated activation of GIPR at the medium confidence threshold (FIG. 8).

[0328] Separately, using the Pathway Hunter assays we determined that M. faecis MH23-1 and MH23-2 both suppress neurotrophin-3 activation of nuclear factor of activated T-cells (NFAT) in a reporter cell line.

M. faecis Modulates Cytokines in PBMC CD3⁺ and CD3⁻ Cells.

[0329] It was hypothesised that the bioactives produced by M. faecis may have direct effects on peripheral immune cells. In order to interrogate this hypothesis, first the ability of M. faecis culture supernatant to prevent IL-6 mediated activation of T cells (CD3⁺ CD4⁺, CD3⁺ CD8⁺, CD3⁺ TCRγδ⁺), Natural Killer Cells (CD56⁺) and Antigen Presenting Cells (CD11b⁺, CD11b⁺ CD80⁺, CD11c⁺, CD11c⁺ CD80⁺) was assessed. Treatment with M. faecis MH23 CS resulted in an increased geometric mean of the fluorescent intensity (GMFI) of CD69 expressing populations of the total CD3⁺ T cell populations and the CD3⁺ CD4⁺, CD3⁺ CD8⁺, but not CD3⁺ TCRγδ⁺ cell sub-populations relative to the TY medium control (FIG. 9A-C). There was also an increased GMFI of CD69 expressing populations of natural killer cells following treatment with M. faecis MH23-2 supernatant or M. faecis MH23-1 supernatant and PIM. In contrast, there was a modest reduction in GMFI of HLA-DR expressing populations of CD11b⁺ CD80⁺ HLA-DR⁺ cells (FIG. 9C), and CD11b⁺ (MH23-1 and MH23-2), CD11b⁺ CD80⁺ (MH23-1 and MH23-2), CD11c⁺ (MH23-2) and CD11c⁺ CD80⁺ (M. faecis MH23-1 and MH23-2) cells relative to the TY medium control (FIG. 9A-C).

[0330] Next, the effect of M. faecis CS on cytokine production in CD3⁺ and CD3⁻ cells derived from peripheral blood was assessed. CD3⁺ and CD3⁻ cells stimulated with PMA/ionomycin/monensin were characterised by a significant increase in IFNγ production. Treatment with M. faecis strain MH23-1 or MH23-2 CS inhibited IFNγ production to basal levels relative to the TY medium (FIG. 9D-E; p<0.01). Separately, treatment with M. faecis MH23-1 or MH23-2 culture supernatant induced IL-22 production relative to the TY medium (FIG. 9F) in CD3⁻ cells. Taken together, this shows that M. faecis can modulate key cytokines that are considered characteristic of Th1 and Th17 immune driven responses.

M. faecis Promotes Intestinal Epithelial Cell Migration.

[0331] Damage of the intestinal barrier commonly occurs in inflammatory and autoimmune conditions. The rapid migration of intestinal epithelial cells is a crucial component of the wound healing process to re-establish homeostasis. To investigate whether bioactives secreted by M. faecis can affect the motility of intestinal epithelial cells, a Transwell® migration assay was employed. HCT116 cells were seeded apically in a Transwell® chamber and the ability of an M. faecis extract to promote migration to the basolateral side of the chamber was assessed. DMEM-treated cells had a basal level of cell migration and this was unaffected by treatment with TY medium (FIG. 10A,B). Notably, treatment with M. faecis MH23-1 and MH23-2 both significantly promoted the migration of HCT116 cells (FIG. 10A,B).

[0332] The pro-migratory effects of M. faecis were further confirmed using the IncuCyte scratch wound assay. After induction of a scratch wound, HCT116 cells showed an accelerated rate of wound closure in the presence of extract from M. faecis strains MH23-1 and MH23-2, compared to the control cells treated with TY medium (FIG. 10C,D).

M. lactaris Suppresses IL-23-Mediated STAT3 Activation.

[0333] In light of the above results, the inventors next sought to confirm that these results could be extrapolated to highly similar bacterial species that were also associated with inflammatory and autoimmune disease. In this regard, the ability of the culture supernatant of two M. lactaris species (M. lactaris ATCC 29176 and M. lactaris MH54) to suppress IL-23-mediated activation of STAT3 was assessed using the HEK Blue IL-23 reporter cell line. The HEK Blue IL-23 cell line contains a STAT3 responsive SEAP reporter whose expression is induced by IL-23. Treatment with tofacitinib, a pan JAK inhibitor, inhibits IL-23 mediated SEAP expression. Treatment with TY medium resulted in modest suppression of IL-23 mediated activation of STAT3 (FIG. 11). The present inventors examined the ability of culture supernatant and the <3 kDa supernatant fraction to modulate STAT3 activity. The <3 kDa fraction was assessed as it was hypothesized that the suppressive effect would be due to low molecular weight bioactives, which would have the advantage of being more amenable to drug development.

[0334] Both M. lactaris strains suppressed IL-23-mediated STAT3 activation (FIG. 1A-B). Notably, the M. lactaris <3 kDa fractions suppressed IL-23-mediated STAT3 activation to a similar extent as the cell free culture supernatant.

M. faecis Supports Gut Barrier Function and Improves Gut Barrier Integrity.

[0335] Intestinal epithelial cells form a physical and biochemical barrier that separates host tissue from gut microbes and luminal contents (Peterson and Artis, 2014). Impaired gut barrier function has been implicated in the pathogenesis of several diseases including IBD (Vanuytsel et al., 2021) and has been proposed as a therapeutic target to improve disease outcomes (Sommer et al., 2021). The integrity of the gut epithelial cell barrier can be assessed using a simple, non-invasive method termed trans-epithelial electrical resistance (TEER). In the TEER assay, an electrical current is applied across an epithelial cell layer and the resistance is measured. A reduction in the TEER value is indicative of a compromised barrier. TEER measurements constitute the “gold standard” for non-invasive measurements of barrier integrity in mono-culture cell layers.

[0336] The present inventors assessed the ability of M. faecis to modulate barrier function using T84 gut epithelial cell line. Following treatment with IFN-γ for 24 hours there was a significant drop in resistance indicating an increase in barrier permeability. As expected, treatment with tofacitinib (see, Sayoc-Becerra et al., 2020) significantly ameliorated the reduction in TEER. Treatment with <3 kDa fractionated culture supernatant from M. faecis strain MH23-1 or MH23-3 also ameliorated the reduction in TEER relative to the TY medium control (FIG. 12A). At 144 hours post IFN-γ treatment, treatment with the culture supernatant M. faecis strain MH23-1 or MH23-3 ameliorated the reduction in TEER relative to the TY medium control (FIG. 12B).

[0337] The present inventors next assessed the ability of MH23 extract to promote restoration of barrier integrity following IFNγ treatment. Treatment with IFNγ for 72 hours resulted in a significant reduction in TEER. Consistent with previous reports (Boivin et al., 2009), the NF-κB inhibitor PDTC ameliorated the impact of the IFNγ treatment on TEER. Treatment with the YG/V medium extract did not affect TEER however MH23-3 culture supernatant extract resulted in a significant increase in TEER relative to YG/V control, which was indicative of improved barrier integrity (FIG. 12C). Taken together, these data demonstrate that M. faecis produces low molecular weight components that support maintenance and restoration of gut barrier integrity.

### Identification of Metabolites

[0338] The present inventors hypothesized that M. faecis produces metabolites that contribute to therapeutic efficacy. We identified 22 metabolites (classified as Level 1 or 2a) in the cell free culture supernatant that were 2-fold increase relative to the YG/V medium control (Table 5). These included metabolites previously shown to modulate inflammation, immune cell infiltration, oxidative stress and gut barrier function (e.g., ornithine (see, Qi et al., 2019) (1), N-acetyl-cysteine (e.g. (Masnadi Shirazi et al., 2021, and You et al., 2009) pyrogallol (Chicas et al., 2020) and propionylcarnitine (Scioli et al., 2014), amongst others).

TABLE 5
Identification of metabolites in supernatant

| Name | Fold change |
|---|---|
| Ornithine | 2806.953702 |
| N-Acetyl-glutamic acid | 272.2521184 |
| N8-Acetylspermidine | 113.9090955 |
| NAD+ | 53.59550359 |
| N-Acetyl-cysteine | 27.95733379 |
| Creatinine | 15.82069695 |
| Allopurinol | 10.81125942 |
| Inosine | 9.58598181 |
| delta-decenolactone | 9.004221142 |
| δ-Gluconolactone | 6.313585578 |
| Homocysteine | 5.314445862 |
| Acetylhistidine | 5.202521545 |
| Carbamoylaspartate | 5.190828821 |
| Pyrogallol | 4.091891298 |
| Adenine | 3.260166157 |
| Xanthosine | 3.112303737 |
| Propionylcarnitine | 2.947440406 |
| 4-Methyl-2-oxovaleric acid | 2.709985519 |
| Crotonic acid | 2.40415397 |
| 4-Hydroxy-2,5-dimethyl- | 2.289388196 |
| 3(2H)-furanone | |
| Uridine | 2.109979308 |
| Riboflavin | 2.100136471 |

### Materials & Methods

### Bacterial Strains, Culture Conditions and Analyses.

[0339] Stool samples were collected from healthy human adults with no history of gastrointestinal disorders and mixed with an equal weight per volume of sterile oxygen free glycerol solution (McSweeney et al., 2005). Donors had not consumed antibiotics in the three months prior to collection of the faecal samples. M. faecis and Faecalibacterium prausnitzii were routinely processed in a Coy vinyl anaerobic chamber with an oxygen free atmosphere (85% N₂:10% CO₂:5% H₂) atmosphere. M. faecis was routinely cultured in TY or PYG medium (as described in McSweeney et al., 2005) while F. prausnitzii was cultured in TY medium (McSweeney, 2005). All isolates were stocked by mixing 3 mL of actively growing culture with an equal volume of glycerol solution and storing at −80° C.

Isolation of M. faecis.

[0340] Enrichments of M. faecis MH23-1 and MH23-2 were produced by inoculating a donor faecal sample with M. faecis present at a relative abundance of 0.47% into Schaedler broth and then serially diluting to extinction. The dilution-to-extinction culture series was sequenced and an enrichment culture with M. faecis at 14% relative abundance was identified. This enrichment was subsequently diluted to extinction in Schaedler broth and an enrichment in the culture series with M. faecis at 42% relative abundance was identified. Colonies were recovered by streaking on Bacteroides Bile Esculin Agar with the aminoglycoside antibiotics omitted and two isolates termed M. faecis MH23-1 and MH23-2 were identified by whole genome sequencing. M. faecis MH23-3 was produced by inoculating a donor faecal sample with M. faecis at 0.12% relative abundance into Yeast N-acetylglucosamine broth (the recipe for Yeast N-acetylglucosamine broth is as per YG medium in Table 1 except that glucose is replaced by an equal amount of N-acetylglucosamine) and then serially diluting to extinction. An enrichment with M. faecis at 47.8% was identified and axenic isolates were subsequently produced by streaking on TY medium supplemented with 0.5% v/v sodium azide solution (10% w/v). M. faecis MH23-3 was identified by whole genome sequencing. M. faecis MH23-4 was produced by inoculating a donor faecal sample with M. faecis at 0.37% relative abundance into Yeast Fructose (YF) broth (the recipe for YF broth is as per YG medium in Table 1 except that glucose is replaced by an equal amount of fructose) and then serially diluting to extinction. An enrichment with M. faecis at 94.8% was identified and axenic isolates were subsequently produced by streaking on TY medium. M. faecis MH23-4 was identified by whole genome sequencing.

Isolation of M. lactaris.

[0341] M. lactaris (strain 14.1.C2, MH54) was isolated using from a faecal sample from a healthy subject with no history of gastrointestinal disorders. M. lactaris and M. torques were routinely processed in a Coy vinyl anaerobic chamber with an oxygen free atmosphere (85% N₂:10% CO₂:5% H₂) atmosphere. M. lactaris and M. torques were routinely cultured using TY or YG/V medium (Table 1). M. lactaris MH54 was isolated on TY agar. All isolates were stocked by mixing 3 mL of actively growing culture with an equal volume of glycerol solution and stored at −80° C.

### Metabolic Reconstruction.

[0342] Protein coding sequences were predicted and annotated using the annotate function in enrichM (version 0.5.2). Briefly, enrichM identifies protein coding sequences using prodigal (version 2.6.3) in -p meta mode. The amino acid sequences are then searched against the UniRef100 database (downloaded November 2020) using DIAMOND (version 2.0.4), and E.C., TCDB and eggnog classifications are inherited from the idmapping file distributed with UniRef. Hmmer hmmsearches (version 3.1b2) against Pfam (release 33.0), tigrfam (release 15.0) and dbcan2 (downloaded September 2019) were used to annotate functional domains, key metabolic markers and carbohydrate activate (CAZy) enymes, respectively. Metabolic pathways were identified using the classify function in enrichM, which assesses annotations and their genomic position against manually defined metabolic pathway definitions. A pathway is considered present in a genome if it encoded >80% of the required proteins, and passes all required synteny checks. These automatically predicted pathways were then manually assessed. In addition, gutSMASH (version 1.0.0) was applied to identify common biosynthetic pathways encoded by gut microorganisms.

### Phylogenetic Tree

[0343] A genome tree was constructed from high quality genomes, defined as ≥90% complete and ≤−5% contamination from checkM analysis, within the Mediterraneibacter genus (NCBI r95) and the four MH23 isolates. For each genome, a set of 122 bacteria-specific conserved marker genes were extracted from each genome using gtdbtk identify. These genes were the aligned to profile HMMs and concatenated to a single alignment with gtdbtk align, and a Maximum likelihood phylogenetic tree was constructed from the alignments using FastTree (version 2.1.10) with gtdbtk infer. Non-parametric bootstrap values were inferred using GenomeTreetk (v0.1.6) from 1000 repetitions.

### Preparation of Bacterial Strains for Animal Experimentation.

[0344] M. faecis and F. prausnitzii strains were grown to early stationary phase in TY medium. The cell density of the individual cultures was calculated using a Helber Counting Chamber. To prepare the bacterial gavage solutions, individual cultures were centrifuged under a layer of sterile heavy mineral oil at 5,000 g for 10 minutes and the cell-free supernatant was then discarded. The cell pellets were washed in 1.5 mL of sterile anaerobic buffered diluent (38 mL/L each of salt solutions 2 & 3 (McSweeney et al., 2005), 1 mL/L of 0.1% (w/v) resazurin solution, 1 g/L L-cysteine) and then centrifuged again. Finally, the washed cell pellet was resuspended in half strength glycerol solution (15% v/v glycerol solution in anoxic buffered diluent) to a final concentration of 1×10⁹ cells/mL, aliquoted and frozen at −80° C. until required. The viability of the cell preparations was confirmed by thawing a single aliquot and streaking on an agar plate. The identity and purity of the individual strain preparations was confirmed by whole genome sequencing.

### Acute Model of DSS-Induced Gut Barrier Dysfunction.

[0345] Six-week-old C57BL/6 female mice purchased from Animal Resources Centres (Western Australia, Australia) were randomised and then co-housed for seven days prior to experimentation. To induce gut barrier dysfunction, mice were treated with 3% DSS ad libiteum in the drinking water for six days. Naïve age matched control mice were processed and received DSS free drinking water. All treatments started one day prior to provision of DSS and all mice were sacrificed two days after the final DSS treatment. For the treatments, mice were anesthetised with isofluorane and orally gavaged with 200 μl of bacterial preparations or vehicle control. Prednisone (2 mg/kg) was administered following anesthetisation by intraperitoneal injection. Body weights and stool consistency were recorded daily. Stool samples were collected daily. Following sacrifice, the colon, liver and spleen were collected for analysis. Blood was collected by cardiac puncture. In the therapeutic model, six-week-old C57BL/6 female mice purchased from Animal Resources Centres (Western Australia, Australia) were randomised and then co-housed for seven days prior to experimentation. To induce gut barrier dysfunction, mice were treated with 2.5% DSS ad libiteum in the drinking water for six days. Naïve age matched control mice were processed and received DSS free drinking water. All treatments started two days prior to completion of the DSS treatments and all mice were sacrificed five days after the final DSS treatment. For the treatments, mice were anesthetised with isofluorane and orally gavaged with 200 μl of bacterial preparations or vehicle control. Prednisone (2 mg/kg) was administered following anesthetisation by intraperitoneal injection. Stool samples were collected daily and following sacrifice, the colons were collected for analysis.

### Endoscopic and Histological Scoring.

[0346] Animals were examined with a small animal gastrointestinal endoscope (Karl Storz Endoskope, Tuttlingen, Germany) on days 1, 2 and 6 to assess the extent of colon mucosal inflammation (Marks et al., 2015; and Liu et al., 2019). Briefly, mice were anesthetised with isoflurane and a colonoscope was inserted through the rectum. Images captured by high-definition videos were examined in a blinded manner to assess the presence and extent of disease pathologies (Table 6). Histological scoring was performed essentially as previously described in the art (see, Marks et al., 2015). Briefly, samples were fixed in 4% formalin, paraffin embedded and sectioned. Tissue sections were hematoxylin and eosin stained to assess disease pathology and with Alcian blue to assess mucin production. Slides were imaged using the Aperio digital imaging system (Leica Biosystems, NuBloch, Germany). To grade colitis severity, the extent of inflammation (colitis activity, see Table 6) and epithelial injury (composite of epithelial hyperplasia and injury, see Table 6) in the tissue sections were graded semi-quantitatively using an established scoring system (Table 7). The samples were then randomised and subsequently scored in a blinded by a trained gastrointestinal pathologist.

TABLE 6
Scoring of Gut Barrier Dysfunction by Colonoscopy

| | |
|---|---|
| Feature | Scoring |

Thickening of the colon wall

| | |
|---|---|
| Transparent | 0 |
| Moderate | 1 |
| Marked | 2 |
| Intransparent | 3 |

Changes in vascular pattern

| | |
|---|---|
| Normal | 0 |
| Moderate | 1 |
| Marked | 2 |
| Bleeding | 3 |

Granularity of the mucosal surface

| | |
|---|---|
| None | 0 |
| Moderate | 1 |
| Marked | 2 |
| Extreme | 3 |

Stool consistency/mucus secretion

| | |
|---|---|
| Normal and solid | 0 |
| Still shaped, mild mucus | 1 |
| Unshaped, mucus | 2 |
| Spread | 3 |

Extent of involved area

| | |
|---|---|
| 0-5% (none) | 0 |
| 5-20% (patchy) | 1 |
| 20-50% (moderate) | 2 |
| >50% (predominant) | 3 |

TABLE 7
SCORING OF HISTOLOGICAL COLITIS
Inflammation score (Scored 0-4)

| | |
|---|---|
| 0 | No evidence of inflammation |
| 1 | Low level of inflammation with scattered |
| | infiltrating mononuclear cells (1-2 foci |
| | only) |
| 2 | Moderate inflammation with multiple foci |
| 3 | High level of inflammation with increased |
| | vascular density and marked wall thickening |
| 4 | Maximal severity of inflammation with |
| | transmural leukocyte infiltration and |
| | loss of goblet cells |

Injury score (Scored 0-3)

| | |
|---|---|
| 0 | No epithelial injury |
| 1 | Occasional epithelial leison |
| 2 | 1-2 foci of ulceration |
| 3 | Extensive ulceration |

Colitis activity (Composite score (/15) based on measures listed below)

| | |
|---|---|
| Hypervascularisation | 0-3 based on severity |
| Presence of mononuclear | 0-3 based on severity |
| cells | |
| Epithelial hyperplasia | 0-3 based on severity |
| Epithelial injury | 0-3 based on severity |
| Presence of neutrophils | 0-3 based on severity |
| Lymphoid aggregates | Scored 0-2, where 0 = 0, 1 = ≤2, and 2 = ≥2 |

### TNBS Model of Colitis

[0347] Groups of 5 or 10 male BALB/c mice were used. Mice were fasted overnight (Day 1) before 2,4,6-Trinitrobenzene sulfonic acid solution (TNBS challenge on Day 2. Distal colitis was induced by intracolonic instillation of TNBS (1 mg in 0.1 mL 50% ethanol) after which, animals were kept in a vertical position for 30 seconds to ensure that the solution remained in the colon. For the treatments, mice were orally gavaged with 200 μl of M. faecis MH23-3 at 1×10⁹ cells/day or vehicle (sterile glycerol and phosphate salt solution) starting from Day 1 (i.e., 1 day before TNBS) to Day 5 for a total of 5 consecutive days (Days 1-5). The positive control Cyclosporin A was given at 75 mg/kg by oral gavage once daily from Day 1 (i.e., 1 day before TNBS) to Day 4 for a total of 4 consecutive days (Days 1-4). On the Day of TNBS challenge, vehicle, M. faecis MH-23.3 and Cyclosporine A were given at 2 hours before TNBS. Animals were sacrificed on Day 5; blood was collected from all animals by cardiac puncture. The colon tissue was also harvested and snap frozen with liquid nitrogen for cytokine measurement. On Day 5, the mice were euthanized by CO₂ asphyxiation. Each colon was removed, rinsed, and then cut from 4 cm from the anus. The tissue sections were fixed in 10% formalin and kept in 70% ethanol for histopathology.

### Histopathological Scoring of TNBS Colitis

[0348] Four-micrometre tissue sections were cut and stained with hematoxylin and eosin (H&E) for histological analysis (Colitis scoring; essentially as described by Dieleman L A et al., 1998) under light microscope (LEICA DM2700 M, USA). Histological criteria included: abnormalities of mucosal architecture, extent of inflammation, erosion or ulceration, epithelial regeneration, and the percentage involvement by the disease process. The scoring was based on the findings of observers by examining two sections from each colon per animal. Total score for colitis (Total Colitis Index) were added, resulting in a combined histologic score range from 0 to 40:

| | | |
|---|---|---|
| Abnormalities | None (normal) | 0 |
| of mucosal | Minimal for focal, not exceeding lamina propria | 1 |
| architecture | Mild abnormality, cystic dilation/aberrant crypts | 2 |
| | Moderate or multifocal abnormalities | 3 |
| | Severe, entire crypt and epithelium lost | 4 |
| Extent of | None | 0 |
| inflammation | Minimal for focal, scattered cells (<10%) | 1 |
| | Mild (10-25%) | 2 |
| | Moderate, inflammatory cells extending into the | 3 |
| | submucosa | |
| | Severe, transmural leukocyte infiltrate from | 4 |
| | mucosa to serosa | |
| Erosion or | No erosion, ulceration, or granulation tissue | 0 |
| ulceration | Minimal or focal, not exceeding lamina propria | 1 |
| | Unequivocal erosion | 2 |
| | Moderate, ulceration | 3 |
| | Severe, ulceration or granulation tissue | 4 |
| Epithelial | Complete regeneration or normal tissue | 0 |
| regeneration | Almost complete regeneration | 1 |
| | Regeneration with crypt depletion | 2 |
| | Surface epithelium not intact | 3 |
| | No tissue repair | 4 |
| Percent | None | 0 |
| involvement | 1-25% | 1 |
| | 26-50% | 2 |
| | 51-75% | 3 |
| | 76-100% | 4 |

Score between 0-20 for 2× sections and add scores for a total range 0-40.

### Characterisation of STAT3 Suppressive Activity.

[0349] To assess STAT3 suppressive activity, three independent colonies were inoculated and grown until early stationary phase. Then, each seed culture broth was used to inoculate two technical replicates each generating six technical replicates from three biological replicates. The technical replicates were grown until early stationary phase and then cell free culture supernatant was harvested as previously described (Giri et al., 2019). Culture supernatants were size fractionated by passing through a 3 kDa CENTRICON® column according to the manufacturer's (Merck Millipore) instructions.

[0350] STAT3 activity was assessed using the HEK Blue IL-23 cell line (Invivogen). Briefly, 50,000 cells per well were seeded in triplicate in a 96-well plate 24 hours prior to the start of the assay. Bacteria supernatant or sterile bacterial medium were mixed at a final concentration of 10%, 25%, or 50% v/v with recombinant human IL-23 (rhIL-23, R&D systems) at a final concentration of 5 ng/mL. This mixture was then added directly to the cells and incubated at 37° C. for 6 hours. The ability of the supernatants to suppress STAT3 activation was compared to the Janus kinase inhibitor tofacitinib (10 μM). STAT3 regulated SEAP reporter activity was assessed using Quanti Blue solution as recommended by the manufacturer (Invivogen). Results are the average of at least three independent experiments. Cytotoxicity was assessed using MTT assay. Briefly, MTT was added to the cells at a final concentration of 1.2 mM. The cells were incubated at 37° C. for 4 hours and then fixed with DMSO. Cytotoxicity was assessed by measuring absorbance at 540 nm as recommended by the manufacturer (Invitrogen, Thermo Fisher, Australia).

### Cytokine Production Assay.

[0351] Cytokine production was assessed using an Ella system (R&D Systems) or by using an IL-8 Human Uncoated ELISA Kit (Thermo Fisher, Australia). For the Ella based experiments, 1×10⁴ cells/well of THP-1 cells were seeded in 96-well plates. Following a 24 hour incubation, THP-1 were induced with PMA at the final concentration of 20 μM for 24 hours to differentiate them into macrophages. Differentiated THP-1 cells were treated with LPS (1 μM) and sample as appropriate and incubated at 37° C. for 6 hours and 24 hours. At these time points, cell supernatants were collected and analysed on the Ella system according to the manufacturer's instructions.

[0352] For the ELISA assays, 1×10⁴ cells/well of HCT116 cells were seeded in duplicate 96 well plates. HCT116 cells were treated with IL-1β (10 ng) and indole-3-carbinol (5 μM) or culture supernatant (10% v/v) as appropriate and incubated at 37° C. for 16 hours. Then, cell supernatants were collected and analysed using an IL-8 human uncoated ELISA Kit according to the manufacturer's instructions.

### GPCR and Cell Pathway Immunomodulatory Activity.

[0353] The ability of gut bacteria to modulate GPCR activity was assessed essentially as described by Colosimo et al., (Colosimo et al., 2019). Briefly, a single colony was inoculated and grown until early stationary phase. This “seed culture” broth was used to inoculate 600 mL of TY broth and the culture was incubated until early stationary phase. Culture supernatants were prepared by centrifuging the culture at 4000 g for 30 minutes and then passing the cell free supernatant through a 3 kDa filter according to the manufacturer's instructions (Sartorius Vivaflow® 50 Ultrafiltration Unit 3 kDa MWCO PES). Activated Amberlite XAD-7 resin was added to 400 mL of 3 kDa filtered cell-free supernatant (10% w/v), and the slurry was gently shaken overnight at 4° C. The resin was collected, washed with 400 mL of deionized water and then mixed with 120 mL of 100% methanol. Following a 2 hour incubation with gentle shaking, the methanol elution was collected. A second elution in 120 mL of 100% methanol was performed as previously described and the two elutions were ultimately combined and dried under vacuum using a rotary evaporator. The extract was fully resuspended at in 100% DMSO (thereafter referred to as 1000×) and stored at −20° C.

[0354] The GPCR modulatory activity of the M. faecis preparations was assessed using the gpcrMAX℠ GPCR Assay Panel (Eurofins, USA) in agonist and antagonist mode. Agonist and antagonist high confident hits were identified as described by Eurofins. Agonist and antagonist medium confident hits were identified as described by Eurofins except that except that the % activity/inhibition was ≥10%. For agonist mode, cells were incubated with supernatant extract to induce a response. Agonist activity was calculated using the following formula: percent activity=100%×(mean RLU of test sample−mean RLU of vehicle control)/(mean MAX control ligand −mean RLU of vehicle control). For the antagonist mode, cells were preincubated with supernatant extract and then treated with known GPCR specific agonists at the respective EC80 concentration. Antagonistic activity was calculated using the following formula: percent inhibition=100%×[1−(mean RLU of test sample−mean RLU of vehicle control)/(mean RLU of EC80 control−mean RLU of vehicle control)]. The SelectScreen™ Cell-based Pathway assays (Thermo Fisher, USA) were performed using supernatant extracts in agonist and antagonist mode. Activation in the activator assays was calculated using the following formula: percent activity=100%×(Response Ratio (supernatant)−Response Ratio (No activation control)/(Response Ratio (Full activation control)−Response Ratio (No activation control)). Inhibition in the inhibitor assays was calculated using the following formula: percent inhibition=100%×[1−(Response Ratio (supernatant)−Response Ratio (No activation control)/(Response Ratio (EC80 control)−Response Ratio (No activation control)). Agonist and antagonist hits were identified as described by the Thermo Fisher.

### Cell Migration Assay.

[0355] The IncuCyte® Live-Cell Imaging System (Essen BioScience) and transwell migration assay were used to assess the migration of HCT116 cells during exposure to sterile culture supernatant from M. faecis. Human HCT116 gut epithelial cells were maintained in McCoys 5a medium supplemented with 10% FBS and 1% Pen/Strep. For the IncuCyte® scratch wound assay, 3.5×10⁴ HCT116 cells were plated on poly-L-ornithine-coated IncuCyte® ImageLock 96-well plates (Essen BioScience). After 24 hours, the IncuCyte® WoundMaker tool was used to induce a homogeneous scratch wound in the nearly confluent cell monolayer. The cells were washed twice with DPBS and then stationary phase culture supernatant from M. faecis at 1% (v/v) in 200 μL 0.5% FBS McCoys 5a medium was added. Uninoculated bacterial media (1%) served as negative control. Immediately after adding the stimulants, the plate was transferred to the IncuCyte® system and cell migration was monitored by imaging each well every 2 hours over the course of 72 hours. Data analysis was performed using the integrated analysis software.

[0356] To assess cell migration via the TRANSWELL® assay, 3.5×10⁴ HCT116 cells were seeded in 100 μL 10% FBS culture medium in the top compartment of a 6.5 mm insert with TC-treated polycarbonate membrane in 24-well plates (8 μm pore size, Corning Costar). 600 μL 10% FBS culture medium was added to the lower compartment. The cells were allowed to settle for 24 hours. After a DPBS wash, 100 μL and 600 μL of 0.5% FBS medium was added to the top and lower compartment, respectively. Then, 0.4× concentrated extract from M. faecis was added to the lower compartment. These bacterial extracts were prepared using an Amberlite XAD-7 resin as previously described. After 16 hours, the cells were washed with DPBS and the cells attached to the top of the membrane were carefully removed with a cotton tip. The migrated cells on the bottom of the membrane were then fixed in 70% ethanol for 10 minutes followed by staining in 0.25% crystal violet for 5 minutes. The TRANSWELL® inserts were washed with water, dried and the membrane mounted with 50% glycerol in water on glass slides and imaged immediately. TRANSWELL® experiments were performed in biological and technical triplicates and for each replicate two representative images of the membrane were taken at 10× magnification. The number of migrated cells was automatically counted using ImageJ and the average cell number displayed. The extent of cell migration was expressed as the average number of migrated cells in two microscopic fields per well from three biological and three technical replicates.

### Characterisation of PBMC Immunomodulatory Activity.

[0357] PBMCs were extracted as previously described (Mallone et al., 2011). Briefly, PBMCs were isolated from blood samples using a Ficoll/Lymphoprep gradient (Stemcell), frozen at −80° C., and stored in liquid nitrogen. For the experiments, 250,000 PBMCs/well were seeded in 24-well plates. PBMCs were stimulated with IL-1β (50 ng/mL), IL-6 (10 ng/mL) for 14 hours at 37° C., and with PMA/Ionomycin/Monensin (40 ng/mL, 1 mg/mL, and 2 mg/mL respectively) for 4 hours at 37° C. An untreated control was used as negative control. Where indicated, PBMCs were pre-treated for 30 minutes at 37° C. with bacterial supernatant or bacterial medium control at final concentration of 10% v/v. PBMCs were stained for the following cell markers using the dilutions determined after performing antibody titration optimizations on unstimulated, untreated human PBMCs: CD3, CD4, CD8, CD69, TCRγδ, CD56, CD11b, CD11c, and CD80. PBMCs were finally analysed with Cytoflex S (Beckman Coulter) and data analysed with FloJo V10.

[0358] To characterise the cytokines present in PBMC culture supernatants, cell culture media supernatants from PBMCs that were stimulated as described above were collected and stored at −80° C. These supernatants were subsequently thawed and used in the LEGENDplex human inflammation panel I assay (BioLegend) to determine effects on cytokine production (IL-1β, IFN-α2, IFN-γ, TNF, MCP-1, IL-6, IL-8, IL-10, IL-12p70, IL-17A, IL-18, IL-23, and GM-CSF). Undiluted supernatants were incubated with capture beads conjugated to an antibody against specific analyte. After washing, a biotinylated detection antibody mixture is added to create a “capture bead-analyte-detection antibody” sandwich. Streptavidin-phycoerythrin (SA-PE) is added to bind to the biotinylated detection antibodies. After a final wash, the mixtures are analyzed by flow cytometry where the beads are differentiated by size and internal fluorescence intensities. Cytokine concentration is determined by PE fluorescence and comparison to a standard curve of known cytokine concentrations using BioLegend's LEGENDplex data analysis software. The unique size and fluorescence characteristics of the beads allows for the simultaneous measurement of 13 cytokines.

### Epithelial Barrier Integrity Assay Using Trans-Epithelial Electrical Resistance (TEER).

[0359] The ability of MH23 to prevent loss of barrier integrity was assessed by measuring the transepithelial electrical resistance across confluent monolayers of T84 gut epithelial cells. T84 cells were purchased from CellBank Australia and cultured in Dulbecco's Modified Eagle Medium Nutrient Mixture 12 (DMEM/F12; ThermoFisher Scientific, Waltham, MA, USA) supplemented with 5% foetal bovine serum and 1% Penicillin-Streptomycin. T84 cells were seeded into 24-well Millicell polycarbonate cell culture inserts with 0.4 μm pore size (PSHT010R5) at a density of 60.000 cells per well in 400 μl medium, and 24 ml of medium was added into the single-well feeder tray. Media changes of both compartments were performed every second day. After 7 days of culture, the upper part of the plate assembly with cell culture inserts were transferred from the feeder tray to a 24-well receiver tray (PSMW010R5), with each well containing 800 μl media. TEER values of each well were then measured daily using the Millicell ERS-2 Voltohmmeter. Experiments were started once the cells in all wells reached stable TEER readings above 1500Ω. Tofacitinib (75 μM), 3 kDa-filtered bacterial medium (TY) or 3 kDa-filtered MH23 bacterial supernatant diluted to 5%, 10% or 20% in T84 medium were added to the apical compartment. After one hour pre-treatment, IFNγ (50 ng/ml) was added basolateral to disrupt barrier integrity and removed after 48 hours treatment. Every 24 hours, treatments and medium were refreshed, and the TEER values were measured in duplicate. The data from two biological replicates with duplicate measurements each were presented as the percentage difference in TEER value compared to the control (untreated T84 cells). Statistical significance was determined by unpaired t-test.

[0360] The ability of MH23 to promote recovery of barrier integrity was also assessed by using the Maestro Pro system. Briefly, T84 cells were grown in (DMEM/F12) supplemented with 10% heat-inactivated foetal bovine serum and 1% Penicillin-Streptomycin in T75 flasks at 37° C., 5% C02 until approximately 75% confluent. Cells were seeded at a density of 0.1×10⁶ cells in a total of 0.2 mL/well in 96-well CytoView-Z plates and incubated at 37° C., 5% C02 in the Maestro Pro system (Axion BioSystems, Atlanta, GA, USA). Media was refreshed every three days. Once stabile TEER measurements had been established (approximately 100 h after seeding), cells were stimulated with recombinant human IFNγ (100 ng/mL; R&D systems, Minneapolis, MN, USA). At 72 h post-stimulation, cells were washed with dPBS (ThermoFisher Scientific, Waltham, MA, USA) and media was replaced with DMEM/F12 only, or DMEM/F12 supplemented with Pyrrolidine dithiocarbamate (PDTC; 50 μM), 1×YG/V media control or 1×MH23-3 bacterial culture supernatant extracts prepared using Amberlite XAD-7 resin as previously outlined. All conditions were analysed as quadruplicates. At 5 h post-treatment, TEER measurements were recorded, and the observed effect of treatment was presented as the percentage difference in TEER value compared to the control (untreated T84 cells). Statistical significance was determined by unpaired t-test.

### Metabolomic Analysis

[0361] To assess the metabolites produced by M. faecis MH23, six independent colonies were inoculated and grown until early stationary phase. Then, each seed culture broth was used to inoculate two technical replicates of YG/V generating 12 technical replicates from six biological replicates. The technical replicates were grown until early stationary phase and then cell free culture supernatant was harvested following centrifugation at 12,550 g for 3 minutes in an anaerobic chamber. Culture supernatants were snap frozen on dry ice and then stored at −80° C. until testing.

[0362] Sample analysis was carried out by MS-Omics (Denmark) as follows. The analysis was carried out using a Thermo Scientific Vanquish LC coupled to Thermo Q Exactive HF MS. An electrospray ionization interface was used as ionization source. Analysis was performed in negative and positive ionization mode. The UPLC was performed using a slightly modified version of the protocol described by Catalin et al. (UPLC/MS Monitoring of Water-Soluble Vitamin Bs in Cell Culture Media in Minutes, Water Application note 2011, 720004042en). Peak areas were extracted using Compound Discoverer 3.1 (Thermo Scientific). Identification of compounds were performed at four levels; Level 1: identification by retention times (compared against in-house authentic standards), accurate mass (with an accepted deviation of 3 ppm), and MS/MS spectra, Level 2a: identification by retention times (compared against in-house authentic standards), accurate mass (with an accepted deviation of 3 ppm). Level 2b: identification by accurate mass (with an accepted deviation of 3 ppm), and MS/MS spectra, Level 3: identification by accurate mass alone (with an accepted deviation of 3 ppm).

[0363] The disclosure of every patent, patent application, and publication cited herein is hereby incorporated herein by reference in its entirety.

[0364] The citation of any reference herein should not be construed as an admission that such reference is available as “Prior Art” to the instant application.

[0365] Throughout the specification the aim has been to describe the preferred embodiments of the invention without limiting the invention to any one embodiment or specific collection of features. Those of skill in the art will therefore appreciate that, in light of the instant disclosure, various modifications and changes can be made in the particular embodiments exemplified without departing from the scope of the present invention. All such modifications and changes are intended to be included within the scope of the appended claims.

### REFERENCES

[0366] Arumugam, M. et al., Enterotypes of the human gut microbiome. Nature 473 (7346): 174-180 (2011).
[0367] Azad et al., Probiotic supplementation during pregnancy or infancy for the prevention of asthma and wheeze:
[0368] systematic review and meta-analysis. BMJ. (2013) 347:f6471.
[0369] Balato et al., (2014) J. Eur. Acad. Dermatol. Venereol. 28(8): 1016-24.
[0370] Brestoff J. R. and Atris D., Commensal bacteria at the interface of host metabolism and the immune system. Nat. Immunol., 14: 676-684 (2013).
[0371] Britto S L, Krishna M, Kellermayer R. Weight loss is a sufficient and economical single outcome measure of murine dextran sulfate sodium colitis. FASEB bioAdvances. 2019; 1(8): 493-7.
[0372] Chan, W., Chen, A., Tiao, D., Selinger, C. & Leong, R. Medication adherence in inflammatory bowel disease. Intest. Res. 15, 434 (2017).
[0373] Chaumeil, P. A., Mussig, A. J., Hugenholtz, P., and Parks, D. H., GTDB-Tk: A Toolkit to Classify Genomes with the Genome Taxonomy Database. (2020) Bioinformatics 36 (6): 1925-27.
[0374] Cheluvappa et al., (2014) Clin. Exp. Immunol. 175(2): 316-22.
[0375] Chicas M C, Fang C, Talcott S, Talcott S. Microbial Metabolites of Gallotannins Suppress Inflammation in RAW 264.7 Macrophages Through the Modulation of the AMPK/NF-kb Axis. Current Developments in Nutrition. 2020; 4 (Supplement_2): 375.
[0376] Colosimo D A, Kohn J A, Luo P M, Piscotta F J, Han S M, Pickard A J, et al. Mapping interactions of microbial metabolites with human G-protein-coupled receptors. Cell Host & Microbe. 2019; 26(2): 273-82.e7.
[0377] D'Haens, G, Sandborn, W J, Feagan, B G, et al. A review of activity indices and efficacy end points for clinical trials of medical therapy in adults with ulcerative colitis. Gastroenterology. 2007; 132: 763-86.
[0378] Fabro et al., (2015) Immunobiology, 220(1): 124-35.
[0379] GBD 2017 Inflammatory Bowel Disease Collaborators, The global, regional, and national burden of inflammatory bowel disease in 195 countries and territories, 1990-2017: a systematic analysis for the Global Burden of Disease Study 2017; Lancet, 5(1): 17-30.
[0380] Geva-Zatorsky, N. et al. Mining the human gut microbiota for immunomodulatory organisms. Cell 168, 928-943 (2017).
[0381] Giri R, Hoedt E C, Shamsunnahar K, McGuckin M A, Morrison M, Capon R J, et al. Secreted microbial metabolites modulate gut immunity and inflammatory tone. bioRxiv. 2019:2019.12.16.861872.
[0382] Goldin B. R., Gorbach S. L. Clinical indications for probiotics: an overview. Clin Infect Dis. (2008) 46 Suppl 2: 596-100.
[0383] Handbook of Pharmaceutical Excipients, 2nd Edition, (1994), Edited by A Wade and P J Weller.
[0384] Hunter-Cevera, J. C., Maintaining Cultures for Biotechnology and Industry (1996) Academic Press.
[0385] Kabat, A. M., Srinivasan, N. & Maloy, K. J. Modulation of immune development and function by intestinal microbiota. Trends Immunol. 35, 507-517 (2014).
[0386] Kailasapathy et al. (2002) Curr. Issues Intest. Microbiol. 3(2):39-48.
[0387] Karagozian, R. & Burakoff, R. The role of mesalamine in the treatment of ulcerative colitis. Ther. Clin. Risk Manag. 3, 893 (2007).
[0388] Kim, J., S. et al., Ruminococcus faecis sp. nov., isolated from human faeces; J Microbiol. 49 (3), 487-491 (2011).
[0389] Kim et al., Mediterraneibacter butyricigenes sp. nov., a butyrate-producing bacterium isolated from human faeces, J. Microbio. 57(1): 38-44; (2019).
[0390] Kunsch C, Rosen C A. NF-kappa B subunit-specific regulation of the interleukin-8 promoter. Mol Cell Biol. 1993; 13(10): 6137-46.
[0391] Masnadi Shirazi K, Sotoudeh S, Masnadi Shirazi A, Moaddab S-Y, Nourpanah Z, Nikniaz Z. Effect of N-acetylcysteine on remission maintenance in patients with ulcerative colitis: A randomized, double-blind controlled clinical trial. Clinics and Research in Hepatology and Gastroenterology. 2021; 45(4): 101532.
[0392] Li, X., Atkinson, M. A. The role for gut permeability in the pathogenesis of type 1 diabetes—a solid or leaky concept? Pediatr. Diabetes 16, 485-492 (2015).
[0393] Liu G, Mateer S W, Hsu A, Goggins B J, Tay H, Mathe A, et al. Platelet activating factor receptor regulates colitis-induced pulmonary inflammation through the NLRP3 inflammasome. Mucosal Immunol. 2019; 12(4): 862-73.
[0394] Lloyd-Price J, Arze C, Ananthakrishnan A N, Schirmer M, Avila-Pacheco J, Poon T W, et al. Multi-omics of the gut microbial ecosystem in inflammatory bowel diseases. Nature. 2019; 569(7758): 655-62.
[0395] Mallone R., Mannering S. I., Brooks-Worrell B. M., Durinovic-Belló I., Cilio C. M., Wong F. S., et al. Isolation and preservation of peripheral blood mononuclear cells for analysis of islet antigen-reactive T cell responses: position statement of the T-Cell Workshop Committee of the Immunology of Diabetes Society. Clin Exp Immunol. 2011; 163(1): 33-49.
[0396] Marks E, Goggins B J, Cardona J, Cole S, Minahan K, Mateer S, et al. Oral delivery of prolyl hydroxylase inhibitor: AKB-4924 promotes localized mucosal healing in a mouse model of colitis. Inflamm Bowel Dis. 2015; 21(2): 267-75.
[0397] Masco, L. et al., Identification of Bifidobacterium species using rep-PCR fingerprinting, Systematic and Applied Microbiology, 26(4):557-563 (2003).
[0398] McSweeney C. S., Denman S. E., Mackie R. I., Rumen bacteria. In: Makkar HPS; Methods in gut microbial ecology for ruminants. 23-37 (2005).
[0399] Meddings, J. B., Jarand, J., Urbanski, S. J., Hardin, J., Gall, D. G. Increased gastrointestinal permeability is an early lesion in the spontaneously diabetic BB rat. Am. J. Physiol. 276, G951-G957 (1999).
[0400] Mitropoulou et al. (2013) J. Nutr. Metab. (2013) 716861,
[0401] Remington's Pharmaceutical Sciences, Mack Publishing Co. (A. R. Gennaro edit. 1985).
[0402] Monteleone et al., (2011) BMC Medicine. 2011, 9:122.
[0403] Oren A., et al., (2015). Proposal to include the rank of phylum in the international code of nomenclature or prokaryotes. Int. J. Syst. Evol. Microbiol., 65, 4284-4287.
[0404] Parks, D. H., Chuvochina, M., Waite, D. W., Rinke, C., Skarshewski, A., Chaumeil, P. A., and Hugenholtz, P. A Standardized Bacterial Taxonomy Based on Genome Phylogeny Substantially Revises the Tree of Life. (2018) Nature Biotechnology.
[0405] Peterson L. W., Artis D. Intestinal epithelial cells: regulators of barrier function and immune homeostasis. Nat Rev Immunol. 2014; 14:141.
[0406] Qi H, Li Y, Yun H, Zhang T, Huang Y, Zhou J, et al. Lactobacillus maintains healthy gut mucosa by producing L-Ornithine. Communications Biology. 2019; 2(1): 171.
[0407] Sapone, A. et al., Zonulin upregulation is associated with increased gut permeability in subjects with type 1 diabetes and their relatives. Diabetes 55, 1443-1449 (2006).
[0408] Sayoc-Becerra A., Krishnan M., Fan S., Jimenez J., Hernandez R., Gibson K., et al. The JAK-Inhibitor Tofacitinib Rescues Human Intestinal Epithelial Cells and Colonoids from Cytokine-Induced Barrier Dysfunction. Inflamm Bowel Dis. 2020; 26(3):407-22.
[0409] Schieck et al., (2014) J. Allergy Clin. Immunol. 133(3): 888-91.
[0410] Schindler et al., JAK-STAT signaling: from interfeors to cytokines, J. Biol. Chem. (2007) 282(28): 20059-63.
[0411] Schroeder, K W, Tremaine, W J, Ilstrup D M. Coated oral 5-aminosalicylic acid therapy for mildly to moderately activeulcerative colitis. A randomized study. N Engl J Med. 1987; 317: 1625-9.
[0412] Scioli M G, Stasi M A, Passeri D, Doldo E, Costanza G, Camerini R, et al. Propionyl-L-Carnitine is Efficacious in Ulcerative Colitis Through its Action on the Immune Function and Microvasculature. Clin Transl Gastroenterol. 2014; 5(3): e55-e.
[0413] Sokol H, Pigneur B, Watterlot L, Lakhdari O, Bermudez-Humaran L G, Gratadoux J J, et al. Faecalibacterium prausnitzii is an anti-inflammatory commensal bacterium identified by gut microbiota analysis of Crohn disease patients. Proc Natl Acad Sci USA. 2008; 105(43):16731-6.
[0414] Sommer K., Wiendl M., Müller T. M., Heidbreder K, Voskens C, Neurath M F, et al. Intestinal Mucosal Wound Healing and Barrier Integrity in IBD-Crosstalk and Trafficking of Cellular Players. Frontiers in Medicine. 2021; 8(295).
[0415] Sr\dot{u}tková, D. et al., Efficiency of PCR-based methods in discriminating Bifidobacterium longum ssp. Longum and Bifidobacterium longum ssp. infantis strains of human origin. J. Microbiol. Methods, (2011) 87(1): 10-6.
[0416] Togo A. H., et al., Description of Mediterraneibacter massiliensis, gen. nov., sp. nov., a new genus isolated from the gut microbiota of an obese patient and reclassification of Ruminococcus faecis, Ruminococcus lactaris, Ruminococcus torques, Ruminococcus gnavus and Clostridium glycyrrhizinilyticum as Mediterraneibacter faecis comb. nov., Mediterraneibacter lactaris comb. nov., Mediterraneibacter torques comb. nov., Mediterraneibacter gnavus comb. nov. and Mediterraneibacter glycyrrhizinilyticus comb. nov, Antonie Van Leeuwenhoek, 111(11): 2107-2128 (2018).
[0417] Toshimitsu T, Ozaki S, Mochizuki J, Furuichi K, Asami Y. Effects of Lactobacillus plantarum Strain OLL2712 Culture Conditions on the Anti-inflammatory Activities for Murine Immune Cells and Obese and Type 2 Diabetic Mice. Appl Environ Microbiol. 2017; (7): e03001-16.
[0418] Vanuytsel T., Tack J., Farre R. The Role of Intestinal Permeability in Gastrointestinal Disorders and Current Methods of Evaluation. Frontiers in Nutrition. 2021; 8.
[0419] Whitman, W. B., et al. (2018). Proposal of the suffix -ota do denote phyla. Addendum to “Proposal to include the rank of phylum in the International Code of Nomenclature or Prokayotes”. Int. J. Syst. Evol. Microbiol. 68, 967-969,
[0420] Yamamoto A, Itoh T, Nasu R, Nishida R. Effect of sodium alginate on dextran sulfate sodium- and 2,4,6-trinitrobenzene sulfonic acid-induced experimental colitis in mice. Pharmacology. 2013; 92(1-2): 108-16.
[0421] Ye et al., (2015) PLoS One, 10(1): e0117704.
[0422] Yin et al., (2014) Immunogenetics, 66(3): 215-8.
[0423] You Y, Fu J-J, Meng J, Huang G-D, Liu Y-H. Effect of N-acetylcysteine on the Murine Model of Colitis Induced by Dextran Sodium Sulfate Through Up-Regulating PON1 Activity. Digestive Diseases and Sciences. 2009; 54(8):1643-50.
[0424] Zhu Y, Yang S, Zhao N, Liu C, Zhang F, Guo Y, et al. CXCL8 chemokine in ulcerative colitis. Biomed Pharmacother. 2021; 138: 111427.

What is claimed is:

1. A cell of the Mediterraneibacter faecis strain deposited under any one of accession numbers V21/006223, V21/006224, V21/006225, or V21/006226, or a derivative thereof.

2. The cell of claim 1, wherein the cell is at least partially isolated.

3. A biologically pure culture of the Mediterraneibacter faecis strain deposited under any one of accession numbers V21/006223, V21/006224, V21/006225, or V21/006226, or a derivative thereof.

4. A composition comprising the cell of claim 1 or claim 2, or the culture of claim 3.

5. A composition comprising a bacterial strain with a 16S rRNA sequence that is at least about 97.5%, 98%, 98.5% 99%, 99.1%, 99.2%, 99.3%, 99.4%, 99.5%, 99.6%, 99.7%, 99.8%, or 99.9% identical to one or more of SEQ ID NOs: 1-24, or which has a 16S rRNA gene sequence represented by one or more of SEQ ID NOs: 1-24.

6. The composition of claim 4 or claim 5, further comprising a pharmaceutically acceptable excipient, diluent, or carrier.

7. A pharmaceutical composition comprising a bacterial strain with a 16S rRNA sequence that is at least about 97%, 98%, 99%, 99.5%, 99.6%, 99.7%, 99.8%, or 99.9% identical to the 16S rRNA sequence of a bacterial strain of the species Mediterraneibacter faecis, together with a pharmaceutically acceptable carrier, diluent, or excipient.

8. A pharmaceutical composition comprising a bacterial strain that is a phylogenetic descendant of the MRCA of M. faecis and M. lactaris, together with a pharmaceutically acceptable carrier, diluent, or excipient.

9. The pharmaceutical composition of claim 8, wherein the MRCA is defined at node 52630 of the bac120 phylogenetic tree from the Genome Taxonomy Database (GTDB).

10. The composition of any one of claims 5 to 9, wherein the bacterial strain is at least partially isolated.

11. The composition of any one of claims 4 to 9, wherein the bacterial strain is live or dead.

12. The composition of any one of claims 4 to 9, wherein the composition is in a dried form.

13. The composition of claim 12, wherein the composition is formulated in a capsule, a tablet, a pill, a troche, a lozenge, a powder, or a granule.

14. The composition of claim 12 or claim 13, wherein the composition is dried by lyophilization, spray drying, fluidized bed drying, vacuum drying, or a combination thereof.

15. The composition of any one of claims 4 to 14, wherein the composition is formulated for delivery to the gut.

16. The composition of any one of claims 4 to 15, further comprising a prebiotic.

17. The composition of any one of claims 4 to 16, further comprising one or more additional bacterial strains.

18. The composition of claim 17, wherein the one or more additional bacterial strains are at least partially isolated.

19. The composition of any one of claims 4 to 18, wherein the composition does not comprise bacteria of the genus Clostridium.

20. The cell, culture, or composition according to any one of claims 1 to 19, wherein the bacterial strain produces an agent that attenuates or impairs signal transducer and activator of transcription 3 (STAT3) signalling in a cell.

21. The cell, culture or composition according to claim 20, wherein the agent is a small molecule, peptide, or nucleotide.

22. The cell, culture or composition according to claim 20 or claim 21, wherein the agent is released by the bacteria.

23. The cell, culture or composition according to any one of claims 20 to 22, wherein the agent binds specifically to any one of STAT3, JAK2, TYK, or IL-23.

24. The cell, culture, or composition according to any one of claims 1 to 23, wherein the bacterial strain produces one or more metabolites selected from the group comprising or consisting of propionate, lactate, acetate, and formate.

25. The cell, culture, or composition according to any one of claims 1 to 24, wherein the bacterial strain does not produce butyrate.

26. The cell, culture, or composition according to any one of claims 1 to 25, wherein the bacterial strain produces vitamin B12.

27. The cell, culture or composition according to any one of claims 1 to 26, wherein the bacterial strain is of the species M. faecis.

28. The cell, culture or composition according to any one of claims 1 to 26, wherein the bacterial strain is of the species M. lactaris.

29. A food or drink product comprising the composition of any one of claims 4 to 28.

30. A method of restoring or improving gut barrier function in a subject, the method comprising administering to the subject a bacterial strain of the Mediterraneibacter genus, to thereby restore or improve gut barrier function.

31. The method of claim 30, wherein the bacterial strain is a phylogenetic descendant of the MRCA of M. faecis and M. lactaris.

32. The method of claim 31, wherein the MRCA is defined at node 52630 of the bac120 phylogenetic tree from r95 of the Genome Taxonomy Database (GTDB).

33. The method of any one of claims 30 to 32, wherein the bacterial strain is of the species M. faecis.

34. The method of any one of claims 30 to 32, wherein the bacterial strain is of the species M. lactaris.

35. The method of any one of claims 30 to 34, wherein restoring or improving gut barrier function is characterised by at least one of: (i) an increase in the quality and/or quantity of mucin; (ii) improvement in integrity of tight junction proteins; (iii) reduction in translocation of luminal contents into systemic circulation; or (iv) a reduction of intestinal ulcers and/or intestinal wounds.

36. The method of claim 35, wherein the luminal contents includes lipopolysaccharide (LPS).

37. The method of any one of claims 30 to 36, wherein the restoration or improvement in gut barrier dysfunction results in a reduction in systemic inflammation in the subject.

38. The method of claim 37, wherein systemic inflammation is identified in the subject when the level of an inflammatory cytokine (e.g., IL-1β, IL-8, IL-6, and TNF) in a sample from the subject is above a predetermined threshold.

39. A method of inducing or enhancing mucosal healing in a subject, the method comprising administering to the subject a bacterial strain of the Mediterraneibacter genus in an amount sufficient to induce epithelial cell migration and/or proliferation; to thereby induce mucosal healing in the subject.

40. The method of claim 39, wherein the bacterial strain is a phylogenetic descendant of the MRCA of M. faecis and M. lactaris.

41. The method of claim 40, wherein the MRCA is defined at node 52630 of the bac120 phylogenetic tree from r95 of the Genome Taxonomy Database (GTDB).

42. The method of any one of claims 39 to 41, wherein the bacterial strain is of the species M. faecis.

43. The method of any one of claims 39 to 41, wherein the bacterial strain is of the species M. lactaris.

44. The method of any one of claims 39 to 43, wherein mucosal healing is measured using one or more fecal or serum markers.

45. The method of claim 44, wherein one or more fecal markers are selected from the group comprising calprotectin, lactoferrin, metalloproteinase (MMP)-9, and lipocalin-2.

46. The method of any one of claims 39 to 45, wherein mucosal healing is measured using endoscopic score.

47. A method of reducing inflammation in a subject, the method comprising administering to the subject a therapeutically effective amount of a bacterial strain of the Mediterraneibacter genus, to thereby reduce inflammation in the subject.

48. The method of claim 47, wherein the bacterial species is a phylogenetic descendant of the MRCA of M. faecis and M. lactaris.

49. The method of claim 48, wherein the MRCA is defined at node 52630 of the bac120 phylogenetic tree from r95 of the Genome Taxonomy Database (GTDB).

50. The method of any one of claims 47 to 49, wherein the bacterial strain is of the species M. faecis.

51. The method of any one of claims 47 to 49, wherein the bacterial strain is of the species M. lactaris.

52. The method of any one of claims 47 to 51, wherein the inflammation is local to the gut environment, or systemic inflammation.

53. The method of any one of claims 47 to 52, wherein the bacterial strain attenuates the NFκB pathway (e.g., by reducing or inhibiting NFκB).

54. The method of any one of claims 47 to 53, wherein the bacterial strain inhibits production of one or more of cytokines or chemokines selected from the group comprising TNF, IFN-γ, IL-1β, IL-8, and MCP-1.

55. A method of blocking or otherwise inhibiting the activation of STAT3 signalling in a target cell, the method comprising contacting the target cell with at least a soluble component of a bacterial cell preparation of the Mediterraneibacter genus, to block or otherwise inhibit the activation of STAT3 signalling in the target cell.

56. The method of claim 55, wherein the bacterial strain is a phylogenetic descendant of the MRCA of M. faecis and M. lactaris.

57. The method of claim 56, wherein the MRCA is defined at node 52630 of the bac120 phylogenetic tree from r95 of the Genome Taxonomy Database (GTDB).

58. The method of any one of claims 55 to 57, wherein the bacterial strain is of the species M. faecis.

59. The method of any one of claims 55 to 57, wherein the bacterial strain is of the species M. lactaris.

60. The method of any one of claims 55 to 59, wherein the target cell is selected from the group comprising a reporter cell (e.g., a HEK cell), an immune cell (e.g., a Th17 immune cell), an epithelial cell, and an endothelial cell.

61. The method of any one of claims 55 to 60, wherein the bacterial cell preparation comprises a bacterial cell culture.

62. The method of claim 61, wherein the soluble component comprises the supernatant of the bacterial cell culture.

63. The method of any one of claims 55 to 62, wherein the soluble component is substantially depleted of bacterial cells.

64. The method of any one of claims 55 to 60, wherein the bacterial cell preparation comprises a bacterial cell pellet.

65. The method of claim 64, wherein the soluble component comprises soluble fraction of the lysed cells.

66. The method of claim 65, wherein the soluble fraction is substantially separated from the insoluble cell fraction by centrifugation.

67. The method of any one of claims 55 to 66, wherein the method is performed in vitro.

68. A method of blocking or otherwise inhibiting STAT3 signalling in the gut environment of a subject, the method comprising ad mistering to the subject a bacterial strain of the Mediterraneibacter genus, to block or otherwise inhibit STAT3 signalling in the gut environment of the subject.

69. The method of claim 68, wherein the bacterial strain is a phylogenetic descendant of the MRCA of M. faecis and M. lactaris.

70. The method of claim 69, wherein the MRCA is defined at node 52630 of the bac120 phylogenetic tree from r95 of the Genome Taxonomy Database (GTDB).

71. The method of any one of claims 68 to 70, wherein the bacterial strain is of the species M. faecis.

72. The method of any one of claims 68 to 70, wherein the bacterial strain is of the species M. lactaris.

73. The method of any one of claims 68 to 72, wherein the cell is an immune cell (e.g., a Th17 immune cell), epithelial cell, or endothelial cell.

74. The method of any one of claims 68 to 73, wherein the cell is an epithelial cell, wherein the bacterial strain or molecule increases the production of IL-22 in the subject.

75. The method of any one of claims 68 to 74, wherein the bacterial strain produces a molecule that is a direct inhibitor or an indirect inhibitor of STAT3.

76. The method of any one of claims 68 to 75, wherein the bacterial strain produces a molecule that directly inhibits at least one of an IL-23 polypeptide, a JAK2 polypeptide, a TYK2 polypeptide, or a STAT3 polypeptide.

77. The method of any one of claims 30 to 76, wherein the bacterial strain produces one or more of the following metabolites: propionate, lactate acetate, and formate.

78. The method of any one of claims 30 to 77, wherein the bacterial strain produces vitamin B12.

79. The method of any one of claims 30 to 78, wherein the bacterial strain does not produce butyrate.

80. The method of any one of claims 30 to 79, wherein the bacterial strain has a 16S rRNA sequence that is at least about 95%, 96%, 97%, 98%, 99%, 99.1%, 99.2%, 99.3%, 99.4%, 99.5%, 99.6%, 99.7%, 99.8%, or 99.9% identical to the 16S rRNA sequence of a bacterial strain of the species M. faecis; or when the bacterial strain has a 16S rRNA gene sequence of a bacterial strain of M. faecis.

81. The method of any one of claims 30 to 79, wherein the bacterial strain has a 16S rRNA sequence that is at least about 97.5%, 98.5%, 99%, 99.1%, 99.2%, 99.3%, 99.4%, 99.5%, 99.6%, 99.7%, 99.8%, or 99.9% identical to one or more of SEQ ID NOs: 1-24, or when the bacterial strain has the 16S rRNA gene sequence represented by one or more of SEQ ID NOs: 1-24.

82. The method of any one of claims 30 to 81, wherein the bacterial strain is the Mediterraneibacter faecis strain deposited under any one of accession numbers V21/006223, V21/006224, V21/006225, or V21/006226, or a derivative thereof

83. The method of any one of claims 30 to 83, wherein the bacterial strain is at least partially isolated.

84. The method of any one of claims 30 to 53, wherein the bacterial strain is formulated as a pharmaceutical composition, further comprising a pharmaceutically acceptable carrier, diluent or excipient.

85. The method of claim 84, wherein the composition is in a dried form.

86. The method of claim 85, wherein the dried form is selected from the group comprising particles, granules, and powder.

87. The method of claim 85 or claim 86, wherein the composition is dried by lyophilization, spray drying, fluidized bed drying, vacuum drying, or a combination thereof.

88. The method of any one of claims 84 to 87, wherein the pharmaceutical composition is formulated for oral administration.

89. A method of treating or preventing an inflammatory or autoimmune disorder in a subject, the method comprising administering an effective amount of a bacterial strain of the Mediterraneibacter genus to the subject, to thereby treat or prevent the inflammatory or autoimmune disorder.

90. The method of claim 89, wherein the bacterial strain is a phylogenetic descendant of the MRCA of M. faecis and M. lactaris.

91. The method of claim 90, wherein the MRCA is defined at node 52630 of the bac120 phylogenetic tree from r95 of the Genome Taxonomy Database (GTDB).

92. The method of any one of claims 89 to 91, wherein the bacterial strain is of the species M. faecis.

93. The method of any one of claims 89 to 91, wherein the bacterial strain is of the species M. lactaris.

94. The method of claim 93, wherein the inflammatory or autoimmune disorder is selected from the group comprising an inflammatory bowel disease (such as Crohn's disease or ulcerative colitis); asthma (such as allergic asthma or neutrophilic asthma); arthritis (such as rheumatoid arthritis, osteoarthritis, psoriatic arthritis, or juvenile idiopathic arthritis); fatty liver disease (such as nonalcoholic fatty liver disease (NAFLD)); ankylosing spondylitis; psoriasis; systemic lupus erythematosus (SLE); scleroderma; Sjogren's syndrome; vasculitis; type 1 diabetes mellitus.

95. The method of claim 89 or claim 94, wherein the inflammatory or autoimmune disorder is an inflammatory bowel disease (IBD).

96. The method of any one of claims 89 to 95, wherein when administered to a subject, the bacterial strain blocks or otherwise inhibits STAT3 signalling in at least a cell of the subject.

97. The method of claim 96 wherein the cell is an epithelial cell, immune cell (e.g., a Th17 immune cell), or an endothelial cell.

98. The method of any one of claims 89 to 97, wherein the bacterial strain produces one or more metabolites selected from the group comprising propionate, lactate, acetate, and formate.

99. The method according to any one of claims 89 to 98, wherein the bacterial strain does not produce butyrate.

100. The method according to any one of claims 89 to 99, wherein the bacterial strain produces vitamin B12.

101. The method according to any one of claims 89 to 100, wherein the bacterial strain has a 16S rRNA sequence that is at least about 95%, 96%, 97%, 98%, 99%, 99.5%, 99.9% identical to the 16S rRNA sequence of a bacterial strain of the genus Mediterraneibacter.

102. The method according to any one of claims 89 to 100, wherein the bacterial strain has a 16S rRNA sequence that is at least about 95%, 96%, 97%, 98%, 99%, 99.5%, or 99.9% identical to one or more of SEQ ID NOs: 1-24, or when the bacterial strain has the 16S rRNA gene sequence represented by one or more of SEQ ID NOs: 1-24.

103. The method according to any one of claims 89 to 102, wherein the bacterial strain is at least partially isolated.

104. The method according to any one of claims 89 to 103, wherein the bacterial strain is formulated as a pharmaceutical composition, together with a pharmaceutically acceptable carrier, diluent, and/or excipient.

105. The method of claim 104, wherein the composition is in a dried form.

106. The method of claim 105, wherein the dried form is selected from the group comprising particles, granules, and powder.

107. The method of claim 104 or claim 105, wherein the composition is dried by lyophilization, spray drying, fluidized bed drying, vacuum drying, or a combination thereof.

108. The method of any one of claims 89 to 107, wherein an anti-inflammatory agent is co-administered to the subject.

109. The method of claim 108, wherein the anti-inflammatory agent is selected from the group comprising a 5-aminosalicylate, corticosteroid, azathioprine, infliximab, and adalimumab.

110. The method of any one of claims 30 to 109, wherein treating comprises, prior to administering the composition to the subject, identifying that the subject has a deficiency in M. faecis gut bacteria.

111. The method of claim 110, wherein identifying the deficiency in the subject comprises measurement of M. faecis bacteria in the subject's stool by 16S rRNA sequencing and/or whole genome sequencing.

112. The composition of any one of claims 30 to 111, wherein the bacterial strain is live or dead.

113. The composition of any one of claims 30 to 112, further comprising a prebiotic.

114. The composition of any one of claims 30 to 113, further comprising one or more additional bacterial strains.

115. The method of any one of claims 30 to 114, wherein the subject is a mammalian subject.

116. The method of any one of claims 30 to 115, wherein the subject is a human subject.

117. A composition comprising a bacterial strain of the genus Mediterraneibacter, for use in therapy.

118. The composition of claim 117, wherein the bacterial strain is a phylogenetic descendant of the MRCA of M. faecis and M. lactaris.

119. The composition of claim 118, wherein the MRCA is defined at node 52630 of the bac120 phylogenetic tree from r95 of the Genome Taxonomy Database (GTDB).

120. A composition comprising a bacterial strain of Mediterraneibacter faecis, for use in therapy.

121. A composition comprising a bacterial strain of Mediterraneibacter lactaris, for use in therapy.

122. A composition comprising a bacterial strain of the genus Mediterraneibacter, for use in the treatment or prevention of an inflammatory or autoimmune disorder.

123. The composition of claim 122, wherein the bacterial strain is a phylogenetic descendant of the MRCA of M. faecis and M. lactaris.

124. The composition of claim 123, wherein the MRCA is defined at node 52630 of the bac120 phylogenetic tree from r95 of the Genome Taxonomy Database (GTDB).

125. A composition comprising a bacterial strain of Mediterraneibacter faecis, for use in the treatment or prevention of an inflammatory or autoimmune disorder.

126. A composition comprising a bacterial strain of Mediterraneibacter lactaris, for use in the treatment or prevention of an inflammatory or autoimmune disorder.

127. Use of a bacterial strain of the genus Mediterraneibacter in the manufacture of a medicament for the treatment of an inflammatory or autoimmune disorder.

128. The use of claim 127, wherein the bacterial strain is a phylogenetic descendant of the MRCA of M. faecis and M. lactaris.

129. The use of claim 128, wherein the MRCA is defined at node 52630 of the bac120 phylogenetic tree from r95 of the Genome Taxonomy Database (GTDB).

130. Use of a bacterial strain of Mediterraneibacter faecis in the manufacture of a medicament for the treatment of an inflammatory or autoimmune disorder.

131. Use of a bacterial strain of Mediterraneibacter lactaris in the manufacture of a medicament for the treatment of an inflammatory or autoimmune disorder.

132. The composition or use of any one of claims 122 to 131, wherein the inflammatory or autoimmune disorder is selected from an inflammatory bowel disease (such as Crohn's disease or ulcerative colitis); asthma (such as allergic asthma or neutrophilic asthma); arthritis (such as rheumatoid arthritis, osteoarthritis, psoriatic arthritis, or juvenile idiopathic arthritis); fatty liver disease (such as nonalcoholic fatty liver disease (NAFLD)); ankylosing spondylitis; psoriasis; systemic lupus erythematosus (SLE); scleroderma; Sjogren's syndrome; vasculitis; type 1 diabetes mellitus.

133. The composition or use of any one of claims 122 to 132, wherein the inflammatory or autoimmune disorder is an inflammatory bowel disease (e.g., Crohn's disease or ulcerative colitis).

134. The composition of any one of claims 122 to 133, wherein the bacterial strain is the Mediterraneibacter faecis strain deposited under any one of accession numbers V21/006223, V21/006224, V21/006225, or V21/006226, or a derivative thereof.

135. A composition for use in treating an inflammatory or autoimmune disorder, the composition comprises a bacterial strain of the Mediterraneibacter genus; and an anti-inflammatory agent.

136. The composition of claim 135, wherein the bacterial strain is a phylogenetic descendant of the MRCA of M. faecis and M. lactaris.

137. The composition of claim 136, wherein the MRCA is defined at node 52630 of the bac120 phylogenetic tree from r95 of the Genome Taxonomy Database (GTDB).

138. The composition of any one of claims 135 to 137, wherein the bacterial strain is of the species M. faecis.

139. The composition of any one of claims 135 to 137, wherein the bacterial strain is of the species M. lactaris.

140. The composition of claim any one of claims 135 to 139, wherein the anti-inflammatory agent is selected from the group comprising 5-aminosaliculates, corticosteroids, azathioprine, infliximab, and adalimumab.

141. A composition for use in treating an inflammatory or autoimmune disorder, the composition comprises a bacterial strain of the Mediterraneibacter genus; and a nutritional supplement.

142. The composition of claim 141, wherein the bacterial strain is a phylogenetic descendant of the MRCA of M. faecis and M. lactaris.

143. The composition of claim 142, wherein the MRCA is defined at node 52630 of the bac120 phylogenetic tree from r95 of the Genome Taxonomy Database (GTDB).

144. The composition of any one of claims 141 to 143, wherein the bacterial strain is of the species M. faecis.

145. The composition of any one of claims 141 to 143, wherein the bacterial strain is of the species M. lactaris.

146. A method of improving or maintaining health in a subject, the method comprising administering to the subject a composition comprising a bacterial strain of M. faecis; to thereby maintain or improve health in the subject.

147. The method of claim 146, further comprising administering to the subject a nutritional supplement.

148. A comestible or potable product comprising a bacterial strain of the Mediterraneibacter genus; and a nutritional supplement.

149. The product of claim 148, wherein the bacterial strain is a phylogenetic descendant of the MRCA of M. faecis and M. lactaris.

150. The product of claim 149, wherein the MRCA is defined at node 52630 of the bac120 phylogenetic tree from r95 of the Genome Taxonomy Database (GTDB).

151. The product of any one of claims 148 to 150, wherein the bacterial strain is of the species M. faecis.

152. The product of any one of claims 148 to 150, wherein the bacterial strain is of the species M. lactaris.

153. The product of any one of claims 148 to 152, wherein the nutritional supplement is a prebiotic.

The application's sequence listing, which the Patent Office published only in electronic form, follows.

SEQUENCE LISTING (38 sequences)

SEQ ID NO: 1 - DNA, 1528 bp, Mediterraneibacter faecis
aacgagagtttgatcctggctcaggatgaacgctggcggcgtgcttaacacatgcaagtcgaacgaagcaccttgatttgattcttcggatgaagatcttggtgactgagtggcggacgggtgagtaacgcgtgggtaacctgcctcatacagggggataacagttagaaatgactgctaataccgcataagaccacagcaccgcatggtgcaggggtaaaaactccggtggtatgagatggacccgcgtctgattaggtagttggtggggtaacggcctaccaagccgacgatcagtagccgacctgagagggtgaccggccacattgggactgagacacggcccaaactcctacgggaggcagcagtggggaatattgcacaatgggggaaaccctgatgcagcgacgccgcgtgagcgatgaagtatttcggtatgtaaagctctatcagcagggaagaaaatgacggtacctgactaagaagcaccggctaaatacgtgccagcagccgcggtaatacgtatggtgcaagcgttatccggatttactgggtgtaaagggagcgtagacggagtggcaagtctgatgtgaaaacccggggctcaaccccgggactgcattggaaactgtcaatctagagtaccggagaggtaagcggaattcctagtgtagcggtgaaatgcgtagatattaggaggaacaccagtggcgaaggcggcttactggacggtaactgacgttgaggctcgaaagcgtggggagcaaacaggattagataccctggtagtccacgccgtaaacgatgactactaggtgttgggcagcaaagctgttcggtgccgcagcaaacgcaataagtagtccacctggggagtacgttcgcaagaatgaaactcaaaggaattgacggggacccgcacaagcggtggagcatgtggtttaattcgaagcaacgcgaagaaccttacctgctcttgacatctccctgaccggcaagtaatgttgcctttccttcgggacagggatgacaggtggtgcatggttgtcgtcagctcgtgtcgtgagatgttgggttaagtcccgcaacgagcgcaacccctatctttagtagccagcggtttggccgggcactctagagagactgccagggataacctggaggaaggtggggatgacgtcaaatcatcatgccccttatgagcagggctacacacgtgctacaatggcgtaaacaaagggaggcagaaccgcgaggtcgagcaaatcccaaaaataacgtctcagttcggattgtagtctgcaactcgactacatgaagctggaatcgctagtaatcgcgaatcagaatgtcgcggtgaatacgttcccgggtcttgtacacaccgcccgtcacaccatgggagtcagtaacgcccgaagtcagtgacccaaccgtaaggagggagctgccgaaggtgggaccgataactggggtgaagtcgtaacaaggtagccgtatcggaaggtgcggctggatcacctccttt

SEQ ID NO: 2 - DNA, 1528 bp, Mediterraneibacter faecis; identical to SEQ ID NO: 1

SEQ ID NO: 3 - DNA, 1528 bp, Mediterraneibacter faecis
aacgagagtttgatcctggctcaggatgaacgctggcggcgtgcttaacacatgcaagtcgaacgaagcaccttgatttgattcttcggatgaagatcttggtgactgagtggcggacgggtgagtaacgcgtgggtaacctgcctcatacagggggataacagttagaaatgactgctaataccgcataagaccacagcaccgcatggtgcaggggtaaaaactccggtggtatgagatggacccgcgtctgattaggtagttggtggggtaacggcctaccaagccgacgatcagtagccgacctgagagggtgaccggccacattgggactgagacacggcccaaactcctacggagagcagcagtggggaatattgcacaatgggggaaaccctgatgcagcgacgccgcgtgagcgatgaagtatttcggtatgtaaagctctatcagcagggaagaaaatgacggtacctgactaagaagcaccggctaaatacgtgccagcagccgcggtaatacgtatggtgcaagcgttatccggatttactgggtgtaaagggagcgtagacggagtggcaagtctgatgtgaaaacccggggctcaaccccgggactgcattggaaactgtcaatctagagtaccggagaggtaagcggaattcctagtgtagcggtgaaatgcgtagatattaggaggaacaccagtggcgaaggcggcttactggacggtaactgacgttgaggctcgaaagcgtggggagcaaacaggattagataccctggtagtccacgccgtaaacgatgactactaggtgttgggcagcaaagctgttcggtgccgcagcaaacgcaataagtagtccacctggggagtacgttcgcaagaatgaaactcaaaggaattgacggggacccgcacaagcggtggagcatgtggtttaattcgaagcaacgcgaagaaccttacctgctcttgacatctccctgaccggcaagtaatgttgcctttccttcgggacagggatgacaggtggtgcatggttgtcgtcagctcgtgtcgtgagatgttgggttaagtcccgcaacgagcgcaacccctatctttagtagccagcggtttggccgggcactctagagagactgccagggataacctggaggaaggtggggatgacgtcaaatcatcatgccccttatgagcagggctacacacgtgctacaatggcgtaaacaaagggaggcagaaccgcgaggtcgagcaaatcccaaaaataacgtctcagttcggattgtagtctgcaactcgactacatgaagctggaatcgctagtaatcgcgaatcagaatgtcgcggtgaatacgttcccgggtcttgtacacaccgcccgtcacaccatgggagtcagtaacgcccgaagtcagtgacccaaccgtaaggagggagctgccgaaggtgggaccgataactggggtgaagtcgtaacaaggtagccgtatcggaaggtgcggctggatcacctccttt

SEQ ID NO: 4 - DNA, 1530 bp, Mediterraneibacter faecis
aacgagagtttgatcctggctcaggatgaacgctggcggcgtgcttaacacatgcaagtcgaacgaagcaccttgatttgattcttcggatgaagatcttggtgactgagtggcggacgggtgagtaacgcgtgggtaacctgcctcatacagggggataacagttagaaatgactgctaataccgcataagaccacagcaccgcatggtgcaggggtaaaaactccggtggtatgagatggacccgcgtctgattaggtagttggtggggtaacggcctaccaagccgacgatcagtagccgacctgagagggtgaccggccacattgggactgagacacggcccaaactcctacgggagcagcagcagtggggaatattgcacaatgggggaaaccctgatgcagcgacgccgcgtgagcgatgaagtatttcggtatgtaaagctctatcagcagggaagaaaatgacggtacctgactaagaagcaccggctaaatacgtgccagcagccgcggtaatacgtatggtgcaagcgttatccggatttactgggtgtaaagggagcgtagacggagtggcaagtctgatgtgaaaacccggggctcaaccccgggactgcattggaaactgtcaatctagagtaccggagaggtaagcggaattcctagtgtagcggtgaaatgcgtagatattaggaggaacaccagtggcgaaggcggcttactggacggtaactgacgttgaggctcgaaagcgtggggagcaaacaggattagataccctggtagtccacgccgtaaacgatgactactaggtgttgggcagcaaagctgttcggtgccgcagcaaacgcaataagtagtccacctggggagtacgttcgcaagaatgaaactcaaaggaattgacggggacccgcacaagcggtggagcatgtggtttaattcgaagcaacgcgaagaaccttacctgctcttgacatctccctgaccggcaagtaatgttgcctttccttcgggacagggatgacaggtggtgcatggttgtcgtcagctcgtgtcgtgagatgttgggttaagtcccgcaacgagcgcaacccctatctttagtagccagcggtttggccgggcactctagagagactgccagggataacctggaggaaggtggggatgacgtcaaatcatcatgccccttatgagcagggctacacacgtgctacaatggcgtaaacaaagggaggcagaaccgcgaggtcgagcaaatcccaaaaataacgtctcagttcggattgtagtctgcaactcgactacatgaagctggaatcgctagtaatcgcgaatcagaatgtcgcggtgaatacgttcccgggtcttgtacacaccgcccgtcacaccatgggagtcagtaacgcccgaagtcagtgacccaaccgtaaggagggagctgccgaaggtgggaccgataactggggtgaagtcgtaacaaggtagccgtatcggaaggtgcggctggatcacctccttt

SEQ ID NO: 5 - DNA, 1532 bp, Mediterraneibacter faecis
aacgagagtttgatcctggctcaggatgaacgctggcggcgtgcttaacacatgcaagtcgaacgaagcaccttattctgatttcttcggaatgaaaaatttggtgactgagtggcggacgggtgagtaacgcgtgggtaacctgcctcatacagggggataacagttagaaatgactgctaataccgcataagaccacggcaccgcatggtgcaggggtaaaaactccggtggtatgagatggacccgcgtctgattaggtagttggtggggtaacggcctaccaagccgacgatcagtagccgacctgagagggtgaccggccacattgggactgagacacggcccaaactcctacgggaggcagcagtggggaatattgcacaatgggggaaaccctgatgcagcgacgccgcgtgagcgatgaagtatttcggtatgtaaagctctatcagcagggaagaaaatgacggtacctgactaagaagcaccggctaaatacgtgccagcagccgcggtaatacgtatggtgcaagcgttatccggatttactgggtgtaaagggagcgtagacggagtggcaagtctgatgtgaaaacccggggctcaaccccgggactgcattggaaactgtcaatctagagtaccggagaggtaagcggaattcctagtgtagcggtgaaatgcgtagatattaggaggaacaccagtggcgaaggcggcttactggacggtaactgacgttgaggctcgaaagcgtggggagcaaacaggattagataccctggtagtccacgccgtaaacgatgactactaggtgttgggcagcaaagctgttcggtgccgcagcaaacgcaataagtagtccacctggggagtacgttcgcaagaatgaaactcaaaggaattgacggggacccgcacaagcggtggagcatgtggtttaattcgaagcaacgcgaagaaccttacctgctcttgacatctccctgaccggcaagtaatgttgcctttccttcgggacagggatgacaggtggtgcatggttgtcgtcagctcgtgtcgtgagatgttgggttaagtcccgcaacgagcgcaacccctatctttagtagccagcggttcggccgggcactctagagagactgccagggataacctggaggaaggtggggatgacgtcaaatcatcatgccccttatgagcagggctacacacgtgctacaatggcgtaaacaaaggagcaagcagaaccgcgaggtcgagcaaatcccaaaaataacgtctcagttcggattgtagtctgcaactcgactacatgaagctggaatcgctagtaatcgcgaatcagaatgtcgcggtgaatacgttcccgggtcttgtacacaccgcccgtcacaccatgggagtcagtaacgcccgaagtcagtgacccaaccgtaaggagggagctgccgaaggtgggaccgataactggggtgaagtcgtaacaaggtagccgtatcggaaggtgcggctggatcacctccttt

SEQ ID NO: 6 - DNA, 1529 bp, Mediterraneibacter faecis
aacgagagtttgatcctggctcaggatgaacgctggcggcgtgcttaacacatgcaagtcgaacgaagcaccttgatttgattcttcggatgaagatcttggtgactgagtggcggacgggtgagtaacgcgtgggtaacctgcctcatacagggggataacagttagaaatgactgctaataccgcataagaccacagcaccgcatggtgcaggggtaaaaactccggtggtatgagatggacccgcgtctgattaggtagttggtggggtaacggcctaccaagccgacgatcagtagccgacctgagagggtgaccggccacattgggactgagacacggcccaaactcctacggagaagcagcagtggggaatattgcacaatgggggaaaccctgatgcagcgacgccgcgtgagcgatgaagtatttcggtatgtaaagctctatcagcagggaagaaaatgacggtacctgactaagaagcaccggctaaatacgtgccagcagccgcggtaatacgtatggtgcaagcgttatccggatttactgggtgtaaagggagcgtagacggagtggcaagtctgatgtgaaaacccggggctcaaccccgggactgcattggaaactgtcaatctagagtaccggagaggtaagcggaattcctagtgtagcggtgaaatgcgtagatattaggaggaacaccagtggcgaaggcggcttactggacggtaactgacgttgaggctcgaaagcgtggggagcaaacaggattagataccctggtagtccacgccgtaaacgatgactactaggtgtcgggcagcaaagctgttcggtgccgcagcaaacgcaataagtagtccacctggggagtacgttcgcaagaatgaaactcaaaggaattgacggggacccgcacaagcggtggagcatgtggtttaattcgaagcaacgcgaagaaccttacctgctcttgacatctccctgaccggcaagtaatgttgcctttccttcgggacagggatgacaggtggtgcatggttgtcgtcagctcgtgtcgtgagatgttgggttaagtcccgcaacgagcgcaacccctatctttagtagccagcggtttggccgggcactctagagagactgccagggataacctggaggaaggtggggatgacgtcaaatcatcatgccccttatgagcagggctacacacgtgctacaatggcgtaaacaaagggaggcagaaccgcgaggtcgagcaaatcccaaaaataacgtctcagttcggattgtagtctgcaactcgactacatgaagctggaatcgctagtaatcgcgaatcagaatgtcgcggtgaatacgttcccgggtcttgtacacaccgcccgtcacaccatgggagtcagtaacgcccgaagtcagtgacccaaccgtaaggagggagctgccgaaggtgggaccgataactggggtgaagtcgtaacaaggtagccgtatcggaaggtgcggctggatcacctccttt

SEQ ID NO: 7 - DNA, 1528 bp, Mediterraneibacter faecis; identical to SEQ ID NO: 1

SEQ ID NO: 8 - DNA, 1528 bp, Mediterraneibacter faecis; identical to SEQ ID NO: 1

SEQ ID NO: 9 - DNA, 1528 bp, Mediterraneibacter faecis; identical to SEQ ID NO: 1

SEQ ID NO: 10 - DNA, 1530 bp, Mediterraneibacter faecis
aacgagagtttgatcctggctcaggatgaacgctggcggcgtgcttaacacatgcaagtcgaacgaagcaccttattctgatttcttcggaatgaaaaatttggtgactgagtggcggacgggtgagtaacgcgtgggtaacctgcctcatacagggggataacagttagaaatgactgctaataccgcataagaccacggcaccgcatggtgcaggggtaaaaactccggtggtatgagatggacccgcgtctgattaggtagttggtggggtaacggcctaccaagccgacgatcagtagccgacctgagagggtgaccggccacattgggactgagacacggcccaaactcctacgggaggcagcagtggggaatattgcacaatgggggaaaccctgatgcagcgacgccgcgtgagcgatgaagtatttcggtatgtaaagctctatcagcagggaagaaaatgacggtacctgactaagaagcaccggctaaatacgtgccagcagccgcggtaatacgtatggtgcaagcgttatccggatttactgggtgtaaagggagcgtagacggagtggcaagtctgatgtgaaaacccggggctcaaccccgggactgcattggaaactgtcaatctagagtaccggagaggtaagcggaattcctagtgtagcggtgaaatgcgtagatattaggaggaacaccagtggcgaaggcggcttactggacggtaactgacgttgaggctcgaaagcgtggggagcaaacaggattagataccctggtagtccacgccgtaaacgatgactactaggtgttgggcagcaaagctgttcggtgccgcagcaaacgcaataagtagtccacctggggagtacgttcgcaagaatgaaactcaaaggaattgacggggacccgcacaagcggtggagcatgtggtttaattcgaagcaacgcgaagaaccttacctgctcttgacatctccctgaccggcaagtaatgttgcctttccttcgggacagggatgacaggtggtgcatggttgtcgtcagctcgtgtcgtgagatgttgggttaagtcccgcaacgagcgcaacccctatctttagtagccagcggttcggccgggcactctagagagactgccagggataacctggaggaaggtggggatgacgtcaaatcatcatgccccttatgagcagggctacacacgtgctacaatggcgtaaacaaagggaggcagaaccgcgaggtcgagcaaatcccaaaaataacgtctcagttcggattgtagtctgcaactcgactacatgaagctggaatcgctagtaatcgcgaatcagaatgtcgcggtgaatacgttcccgggtcttgtacacaccgcccgtcacaccatgggagtcagtaacgcccgaagtcagtgacccaaccgtaaggagggagctgccgaaggtgggaccgataactggggtgaagtcgtaacaaggtagccgtatcggaaggtgcggctggatcacctccttt

SEQ ID NO: 11 - DNA, 1531 bp, Mediterraneibacter faecis
aacgagagtttgatcctggctcaggatgaacgctggcggcgtgcttaacacatgcaagtcgaacgaagcaccttgatttgattcttcggatgaagatcttggtgactgagtggcggacgggtgagtaacgcgtgggtaacctgctctcatacaggggggataacagttagaaatgactgctaataccgcataagaccacagcaccgcatggtgcaggggtaaaaactccggtggtatgagatggacccgcgtctgattaggtagttggtggggtaacggcctaccaagccgacgatcagtagccgacctgagagggtgaccggccacattgggactgagacacggcccaaactcctacgggaggcagcagtggggaatattgcacaatggggggaaaccctgatgcagcgacgccgcgtgagcgatgaagtatttcggtatgtaaagctctatcagcagggaagaaaatgacggtacctgactaagaagcaccggctaaatacgtgccagcagccgcggtaatacgtatggtgcaagcgttatccggatttactgggtgtaaagggagcgtagacggagtggcaagtctgatgtgaaaacccggggctcaaccccgggactgcattggaaactgtcaatctagagtaccggagaggtaagcggaattcctagtgtagcggtgaaatgcgtagatattaggaggaacaccagtggcgaaggcggcttactggacggtaactgacgttgaggctcgaaagcgtggggagcaaacaggattagataccctggtagtccacgccgtaaacgatgactactaggtgtcgggcagcaaagctgttcggtgccgcagcaaacgcaataagtagtccacctggggagtacgttcgcaagaatgaaactcaaaggaattgacggggacccgcacaagcggtggagcatgtggtttaattcgaagcaacgcgaagaaccttacctgctcttgacatctccctgaccggcaagtaatgttgcctttccttcgggacagggatgacaggtggtgcatggttgtcgtcagctcgtgtcgtgagatgttgggttaagtcccgcaacgagcgcaacccctatctttagtagccagcggtttggccgggcactctagagagactgccagggataacctggaggaaggtggggatgacgtcaaatcatcatgccccttatgagcagggctacacacgtgctacaatggcgtaaacaaagggaggcagaaccgcgaggtcgagcaaatcccaaaaataacgtctcagttcggattgtagtctgcaactcgactacatgaagctggaatcgctagtaatcgcgaatcagaatgtcgcggtgaatacgttcccgggtcttgtacacaccgcccgtcacaccatgggagtcagtaacgcccgaagtcagtgacccaaccgtaaggagggagctgccgaaggtgggaccgataactggggtgaagtcgtaacaaggtagccgtatcggaaggtgcggctggatcacctccttt

SEQ ID NO: 12 - DNA, 1531 bp, Mediterraneibacter faecis
aacgagagtttgatcctggctcaggatgaacgctggcggcgtgcttaacacatgcaagtcgaacgaagcaccttgatttgattcttcggatgaagatcttggtgactgagtggcggacgggtgagtaacgcgtgggtaacctgccctcatacagggggataacagttagaaatgactgctaataccgcataagaccacagcaccgcatggcgcaggggtaaaaactccggtggtatgagatggacccgcgtctgattaggtagttggtggggtaacggcctaccaagccgacgatcagtagccgacctgagagggtgaccggccacattgggactgagacacggcccaaactcctacgggagagcagcagtggggaatattgcacaatggggggaaaccctgatgcagcgacgccgcgtgagcgatgaagtatttcggtatgtaaagctctatcagcagggaagaaaatgacggtacctgactaagaagcaccggctaaatacgtgccagcagccgcggtaatacgtatggtgcaagcgttatccggatttactgggtgtaaagggagcgtagacggagtggcaagtctgatgtgaaaacccggggctcaaccccgggactgcattggaaactgtcaatctagagtaccggagaggtaagcggaattcctagtgtagcggtgaaatgcgtagatattaggaggaacaccagtggcgaaggcggcttactggacggtaactgacgttgaggctcgaaagcgtggggagcaaacaggattagataccctggtagtccacgccgtaaacgatgactactaggtgtcgggcagcaaagctgttcggtgccgcagcaaacgcaataagtagtccacctggggagtacgttcgcaagaatgaaactcaaaggaattgacggggacccgcacaagcggtggagcatgtggtttaattcgaagcaacgcgaagaaccttacctgctcttgacatctccctgaccggcaagtaatgttgcctttccttcgggacagggatgacaggtggtgcatggttgtcgtcagctcgtgtcgtgagatgttgggttaagtcccgcaacgagcgcaacccctatctttagtagccagcggtttggccgggcactctagagagactgctagggataacctggaggaaggtggggatgacgtcaaatcatcatgccccttatgagcagggctacacacgtgctacaatggcgtaaacaaagggaggcagaatcgcgaggtcgagcaaatcccaaaaataacgtctcagttcggattgtagtctgcaactcgactacatgaagctggaatcgctagtaatcgcgaatcagaatgtcgcggtgaatacgttcccgggtcttgtacacaccgcccgtcacaccatgggagtcagtaacgcccgaagtcagtgacccaaccgtaaggagggagctgccgaaggtgggaccgataactggggtgaagtcgtaacaaggtagccgtatcggaaggtgcggctggatcacctccttt

SEQ ID NO: 13 - DNA, 1533 bp, Mediterraneibacter faecis
aacgagagtttgatcctggctcaggatgaacgctggcggcgtgcttaacacatgcaagtcgaacgaagcaccttgatctgattcttcggatgaagatcaaggtgactgagtggcggacgggtgagtaacgcgtgggtaacctgcctcatacagggggataacagttagaaatgactgctaataccgcataagaccacagcaccgcatggtgcaggggtaaaaactccggtggtatgagatggacccgcgtctgattaggtagttggtggggtaacggcctaccaagccgacgatcagtagccgacctgagagggtgaccggccacattgggactgagacacggcccaaactcctacgggaggcagcagtggggaatattgcacaatgggggaaaccctgatgcagcgacgccgcgtgagcgatgaagtatttcggtatgtaaagctctatcagcagggaagaaaatgacggtacctgactaagaagcaccggctaaatacgtgccagcagccgcggtaatacgtatggtgcaagcgttatccggatttactgggtgtaaagggagcgtagacggagtggcaagtctgatgtgaaaacccggggctcaaccccgggactgcattggaaactgtcaatctagagtaccggagaggtaagcggaattcctagtgtagcggtgaaatgcgtagatattaggaggaacaccagtggcgaaggcggcttactggacggtaactgacgttgaggctcgaaagcgtggggagcaaacaggattagataccctggtagtccacgccgtaaacgatgactactaggtgtcgggcagcaaagctgttcggtatgccgcagcaaacgcaataagtagtccacctggggagtacgttcgcaagaatgaaactcaaaggaattgacggggacccgcacaagcggtggagcatgtggtttaattcgaagcaacgcgaagaaccttacctgctcttgacatctccctgaccggcaagtaatgttgcctttccttcgggacagggatgacaggtggtgcatggttgtcgtcagctcgtgtcgtgagatgttgggttaagtcccgcaacgagcgcaacccctatctttagtagccagcggttcggccgggcactctagagagactgccagggataacctggaggaaggtggggatgacgtcaaatcatcatgccccttatgagcagggctacacacgtgctacaatggcgtaaacaaagggaggcagaaccgcgaggtcgagcaaatcccaaaaataacgtctcagttcggattgtagtctgcaactcgactacatgaagctggaatcgctagtaatcgcgaatcagaatgtcgcggtgaatacgttcccgggtcttgtacacaccgcccgtcacaccatgggagtcagtaacgcccgaagtcagtgacccaaccgtaaggagggagctgccgaagcgtgggaccgataactggggtgaagtcgtaacaaggtagccgtatcgggaagcgtgcggctggatcacctccttt

SEQ ID NO: 14 - DNA, 1530 bp, Mediterraneibacter faecis
aacgagagtttgatcctggctcaggatgaacgctggcggcgtgcttaacacatgcaagtcgaacgaagcaccttattctgatttcttcggaatgaaaaatttggtgactgagtggcggacgggtgagtaacgcgtgggtaacctgcctcatacagggggataacagttagaaatgactgctaataccgcataagaccacagcaccgcatggtgcaggggtaaaaactccggtggtatgagatggacccgcgtctgattaggtagttggtggggtaacggcctaccaagccgacgatcagtagccgacctgagagggtgaccggccacattgggactgagacacggcccaaactcctacgggaggcagcagtggggaatattgcacaatgggggaaaccctgatgcagcgacgccgcgtgagcgatgaagtatttcggtatgtaaagctctatcagcagggaagaaaatgacggtacctgactaagaagcaccggctaaatacgtgccagcagccgcggtaatacgtatggtgcaagcgttatccggatttactgggtgtaaagggagcgtagacggagtggcaagtctgatgtgaaaacccggggctcaaccccgggactgcattggaaactgtcaatctagagtaccggagaggtaagcggaattcctagtgtagcggtgaaatgcgtagatattaggaggaacaccagtggcgaaggcggcttactggacggtaactgacgttgaggctcgaaagcgtggggagcaaacaggattagataccctggtagtccacgccgtaaacgatgactactaggtgtcgggcagcaaagctgttcggtgccgcagcaaacgcaataagtagtccacctggggagtacgttcgcaagaatgaaactcaaaggaattgacggggacccgcacaagcggtggagcatgtggtttaattcgaagcaacgcgaagaaccttacctgctcttgacatctccctgaccggcaagtaatgttgcctttccttcgggacagggatgacaggtggtgcatggttgtcgtcagctcgtgtcgtgagatgttgggttaagtcccgcaacgagcgcaacccctatctttagtagccagcggtcaggccgggcactctagagagactgccagggataacctggaggaaggtggggatgacgtcaaatcatcatgccccttatgagcagggctacacacgtgctacaatggcgtaaacaaagggaggcagaaccgcgaggtcgagcaaatcccaaaaataacgtctcagttcggattgtagtctgcaactcgactacatgaagctggaatcgctagtaatcgcgaatcagaatgtcgcggtgaatacgttcccgggtcttgtacacaccgcccgtcacaccatgggagtcagtaacgcccgaagtcagtgacccaaccgtaaggagggagctgccgaaggtgggaccgataactggggtgaagtcgtaacaaggtagccgtatcggaaggtgcggctggatcacctccttt

SEQ ID NO: 15 - DNA, 1528 bp, Mediterraneibacter faecis
aacgagagtttgatcctggctcaggatgaacgctggcggcgtgcttaacacatgcaagtcgaacgaagcaccttgatttgattcttcggatgaagatcttggtgactgagtggcggacgggtgagtaacgcgtgggtaacctgcctcatacagggggataacagttagaaatgactgctaataccgcataagaccacagcaccgcatggtgcaggggtaaaaactccggtggtatgagatggacccgcgtctgattaggtagttggtggggtaacggcctaccaagccgacgatcagtagccgacctgagagggtgaccggccacattgggactgagacacggcccaaactcctacgggaggcagcagtggggaatattgcacaatgggggaaaccctgatgcagcgacgccgcgtgagcgatgaagtatttcggtatgtaaagctctatcagcagggaagaaaatgacggtacctgactaagaagcaccggctaaatacgtgccagcagccgcggtaatacgtatggtgcaagcgttatccggatttactgggtgtaaagggagcgtagacggagtggcaagtctgatgtgaaaacccggggctcaaccccgggactgcattggaaactgtcaatctagagtaccggagaggtaagcggaattcctagtgtagcggtgaaatgcgtagatattaggaggaacaccagtggcgaaggcggcttactggacggtaactgacgttgaggctcgaaagcgtggggagcaaacaggattagataccctggtagtccacgccgtaaacgatgactactaggtgtcgggcagcaaagctgttcggtgccgcagcaaacgcaataagtagtccacctggggagtacgttcgcaagaatgaaactcaaaggaattgacggggacccgcacaagcggtggagcatgtggtttaattcgaagcaacgcgaagaaccttacctgctcttgacatctccctgaccggcaagtaatgttgcctttccttcgggacagggatgacaggtggtgcatggttgtcgtcagctcgtgtcgtgagatgttgggttaagtcccgcaacgagcgcaacccctatctttagtagccagcggtcaggccgggcactctagagagactgccagggataacctggaggaaggtggggatgacgtcaaatcatcatgccccttatgagcagggctacacacgtgctacaatggcgtaaacaaagggaggcagaaccgcgaggtcgagcaaatcccaaaaataacgtctcagttcggattgtagtctgcaactcgactacatgaagctggaatcgctagtaatcgcgaatcagaatgtcgcggtgaatacgttcccgggtcttgtacacaccgcccgtcacaccatgggagtcagtaacgcccgaagtcagtgacccaaccgtaaggagggagctgccgaaggtgggaccgataactggggtgaagtcgtaacaaggtagccgtatcggaaggtgcggctggatcacctccttt

SEQ ID NO: 16 - DNA, 1528 bp, Mediterraneibacter faecis; identical to SEQ ID NO: 15

SEQ ID NO: 17 - DNA, 1528 bp, Mediterraneibacter faecis
aacgagagtttgatcctggctcaggatgaacgctggcggcgtgcttaacacatgcaagtcgaacgaagcaccttgatttgattcttcggatgaagatcttggtgactgagtggcggacgggtgagtaacgcgtgggtaacctgcctcatacagggggataacagttagaaatgactgctaataccgcataagaccacagcaccgcatggtgcaggggtaaaaactccggtggtatgagatggacccgcgtctgattaggtagttggtggggtaacggcctaccaagccgacgatcagtagccgacctgagagggtgaccggccacattgggactgagacacggcccaaactcctacgggaggcagcagtggggaatattgcacaatgggggaaaccctgatgcagcgacgccgcgtgagcgatgaagtatttcggtatgtaaagctctatcagcagggaagaaaatgacggtacctgactaagaagcaccggctaaatacgtgccagcagccgcggtaatacgtatggtgcaagcgttatccggatttactgggtgtaaagggagcgtagacggagtggcaagtctgatgtgaaaacccggggctcaaccccgggactgcattggaaactgtcaatctggagtaccggagaggtaagcggaattcctagtgtagcggtgaaatgcgtagatattaggaggaacaccagtggcgaaggcggcttactggacggtaactgacgttgaggctcgaaagcgtggggagcaaacaggattagataccctggtagtccacgccgtaaacgatgactactaggtgtcgggcagcaaagctgttcggtgccgcagcaaacgcaataagtagtccacctggggagtacgttcgcaagaatgaaactcaaaggaattgacggggacccgcacaagcggtggagcatgtggtttaattcgaagcaacgcgaagaaccttacctgctcttgacatctccctgaccggcaagtaatgttgcctttccttcgggacagggatgacaggtggtgcatggttgtcgtcagctcgtgtcgtgagatgttgggttaagtcccgcaacgagcgcaacccctatctttagtagccagcggtcaggccgggcactctagagagactgccagggataacctggaggaaggtggggatgacgtcaaatcatcatgccccttatgagcagggctacacacgtgctacaatggcgtaaacaaagggaggcagaaccgcgaggtcgagcaaatcccaaaaataacgtctcagttcggattgtagtctgcaactcgactacatgaagctggaatcgctagtaatcgcaaatcagaatgtcgcggtgaatacgttcccgggtcttgtacacaccgcccgtcacaccatgggagtcagtaacgcccgaagtcagtgacccaaccgtaaggagggagctgccgaaggtgggaccgataactggggtgaagtcgtaacaaggtagccgtatcggaaggtgcggctggatcacctccttt

SEQ ID NO: 18 - DNA, 1528 bp, Mediterraneibacter faecis
aacgagagtttgatcctggctcaggatgaacgctggcggcgtgcttaacacatgcaagtcgaacgaagcaccttgatttgattcttcggatgaagatcttggtgactgagtggcggacgggtgagtaacgcgtgggtaacctgcctcatacagggggataacagttagaaatgactgctaataccgcataagaccacagcaccgcatggtgcaggggtaaaaactccggtggtatgagatggacccgcgtctgattaggtagttggtggggtaacggcctaccaagccgacgatcagtagccgacctgagagggcgaccggccacattgggactgagacacggcccaaactcctacgggaggcagcagtggggaatattgcacaatgggggaaaccctgatgcagcgacgccgcgtgagcgatgaagtatttcggtatgtaaagctctatcagcagggaagaaaatgacggtacctgactaagaagcaccggctaaatacgtgccagcagccgcggtaatacgtatggtgcaagcgttatccggatttactgggtgtaaagggagcgtagacggagtggcaagtctgatgtgaaaacccggggctcaaccccgggactgcattggaaactgtcaatctggagtaccggagaggtaagcggaattcctagtgtagcggtgaaatgcgtagatattaggaggaacaccagtggcgaaggcggcttactggacggtaactgacgttgaggctcgaaagcgtggggagcaaacaggattagataccctggtagtccacgccgtaaacgatgactactaggtgtcgggcagcaaagctgttcggtgccgcagcaaacgcaataagtagtccacctggggagtacgttcgcaagaatgaaactcaaaggaattgacggggacccgcacaagcggtggagcatgtggtttaattcgaagcaacgcgaagaaccttacctgctcttgacatctccctgaccggcaagtaatgttgcctttccttcgggacagggatgacaggtggtgcatggttgtcgtcagctcgtgtcgtgagatgttgggttaagtcccgcaacgagcgcaacccctatctttagtagccagcggttcggccgggcactctagagagactgccagggataacctggaggaaggtggggatgacgtcaaatcatcatgccccttatgagcagggctacacacgtgctacaatggcgtaaacaaagggaggcagaaccgcgaggtcgagcaaatcccaaaaataacgtctcagttcggattgtagtctgcaactcgactacatgaagctggaatcgctagtaatcgcgaatcagaatgtcgcggtgaatacgttcccgggtcttgtacacaccgcccgtcacaccatgggagtcagtaacgcccgaagtcagtgacccaaccgtaaggagggagctgccgaaggtgggaccgataactggggtgaagtcgtaacaaggtagccgtatcggaaggtgcggctggatcacctccttt

SEQ ID NO: 19 - DNA, 1529 bp, Mediterraneibacter faecis
aacgagagtttgatcctggctcaggatgaacgctggcggcgtgcttaacacatgcaagtcgaacgaagcaccttgatttgattcttcggatgaagatcttggtgactgagtggcggacgggtgagtaacgcgtgggtaacctgcctcatacagggggataacagttagaaatgactgctaataccgcataagaccacagtaccgcatggtacaggggtaaaaactccggtggtatgagatggacccgcgtctgattaggtagttggtggggtaacggcctaccaagccgacgatcagtagccgacctgagagggtgaccggccacattgggactgagacacggcccaaactcctacgggaggcagcagtggggaatattgcacaatgggggaaaccctgatgcagcgacgccgcgtgagcgatgaagtatttcggtatgtaaagctctatcagcagggaagaaaatgacggtacctggctaagaagcaccggctaaatacgtgccagcagccgcggtaatacgtatggtgcaagcgttatccggatttactgggtgtaaagggagcgtagacggagtggcaagtctgatgtgaaaacccggggctcaaccccgggactgcattggaaactgtcaatctagagtaccggagaggtaagcggaattcctagtgtagcggtgaaatgcgtagatattaggaggaacaccagtggcgaaggcggcttactggacggtaactgacgttgaggctcgaaagcgtggggagcaaacaggattagataccctggtagtccacgccgtaaacgatgactactaggtgtcgggcagcaaagctgttcggtgccgcagcaaacgcaataagtagtccacctggggagtacgttcgcaagaatgaaactcaaaggaattgacggggacccgcacaagcggtggagcatgtggtttaattcgaagcaacgcgaagaaccttacctgctcttgacatctccctgaccggcaagtaatgttgcctttccttccgggacagggaagacaggtggtgcatggttgtcgtcagctcgtgtcgtgagatgttgggttaagtcccgcaacgagcgcaacccctatctttagtagccagcggttcggccgggcactctagagagactgccagggataacctggaggaaggtggggatgacgtcaaatcatcatgccccttatgagcagggctacacacgtgctacaatggcgtaaacaaagggaggcagaaccgcgaggtcgagcaaatcccaaaaataacgtctcagttcggattgtagtctgcaactcgactacatgaagctggaatcgctagtaatcgcgaatcagaatgtcgcggtgaatacgttcccgggtcttgtacacaccgcccgtcacaccatgggagtcggtaacgcccgaagtcagtgacccaaccgtaaggagggagctgccgaaggtgggaccgataactggggtgaagtcgtaacaaggtagccgtatcggaaggtgcggctggatcacctccttt

SEQ ID NO: 20 - DNA, 1529 bp, Mediterraneibacter faecis
aacgagagtttgatcctggctcaggatgaacgctggcggcgtgcttaacacatgcaagtcgaacgaagcaccttgattcgattcttcggatgaagatcttggtgactgagtggcggacgggtgagtaacgcgtgggtaacctgcctcatacagggggataacagttagaaatgactgctaataccgcataagaccacagcaccgcatggtgcaggggtaaaaactccggtggtatgagatggacccgcgtctgattaggtagttggtggggtaacggcctaccaagccgacgatcagtagccgacctgagagggtgaccggccacattgggactgagacacggcccaaactcctacgggaggcagcagtggggaatattgcacaatgggggaaaccctgatgcagcgacgccgcgtgagcgatgaagtatttcggtatgtaaagctctatcagcagggaagaaaatgacggtacctgactaagaagcaccggctaaatacgtgccagcagccgcggtaatacgtatggtgcaagcgttatccggatttactgggtgtaaagggagcgtagacggagtggcaagtctgatgtgaaaacccggggctcaaccccgggactgcattggaaactgtcaatctagagtaccggagaggtaagcggaattcctagtgtagcggtgaaatgcgtagatattaggaggaacaccagtggcgaaggcggcttactggacggtaactgacgttgaggctcgaaagcgtggggagcaaacaggattagataccctggtagtccacgccgtaaacgatgactactaggtgtcgggcagcaaagctgttcggtgccgcagcaaacgcaataagtagtccacctggggagtacgttcgcaagaatgaaactcaaaggaattgacggggacccgcacaagcggtggagcatgtggtttaattcgaagcaacgcgaagaaccttacctgctcttgacatctccctgaccggcaagtaatgttgcctttccttcgggacagggatgacaggtggtgcatggttgtcgtcagctcgtgtcgtgagatgttgggttaagtcccgcaacgagcgcaacccctatctttagtagccagcggttcggccgggcactctagagagactgccagggataacctggaggaagcgtggggatgacgtcaaatcatcatgccccttatgagcagggctacacacgtgctacaatggcgtaaacaaagggaggcagaaccgcgaggtcgagcaaatcccaaaaataacgtctcagttcggattgtagtctgcaactcgactacatgaagctggaatcgctagtaatcgcgaatcagaatgtcgcggtgaatacgttcccgggtcttgtacacaccgcccgtcacaccatgggagtcagtaacgcccgaagtcagtgacccaaccgtaaggagggagctgccgaaggtgggaccgataactggggtgaagtcgtaacaaggtagccgtatcggaaggtgcggctggatcacctccttt

SEQ ID NO: 21 - DNA, 1531 bp, Mediterraneibacter faecis
aacgagagtttgatcctggctcaggatgaacgctggcggcgtgcttaacacatgcaagtcgaacgaagcaccttattctgatttcttcggaatgaaaaatttggtgactgagtggcggacgggtgagtaacgcgtgggtaacctgcctcatacagggggataacagttagaaatgactgctaataccgcataagaccacagcaccgcatggtgcaggggtaaaaactccggtggtatgagatggacccgcgtctgattaggtagttggtggggtaacggcctaccaagccgacgatcagtagccgacctgagagggtgaccggccacattgggactgagacacggcccaaactcctacgggaggcagcagtggggaatattgcacaatgggggaaaccctgatgcagcgacgccgcgtgagcgatgaagtatttcggtatgtaaagctctatcagcagggaagaaaatgacgatgccatgactaagaagcaccggctaaatacgtgccagcagccgcggtaatacgtatggtgcaagcgttatccggatttactgggtgtaaagggagcgtagacggagtggcaagtctgatgtgaaaacccggggctcaaccccgggactgcattggaaactgtcaatctagagtaccggagaggtaagcggaattcctagtgtagcggtgaaatgcgtagatattaggaggaacaccagtggcgaaggcggcttactggacggtaactgacgttgaggctcgaaagcgtggggagcaaacaggattagataccctggtagtccacgccgtaaacgatgactactaggtgtcgggcagcaaagctgttcggtgccgcagcaaacgcaataagtagtccacctggggagtacgttcgcaagaatgaaactcaaaggaattgacggggacccgcacaagcggtggagcatgtggtttaattcgaagcaacgcgaagaaccttacctgctcttgacatctccctgaccggcaagtaatgttgcctttccttcgggacagggaagacaggtggtgcatggttgtcgtcagctcgtgtcgtgagatgttgggttaagtcccgcaacgagcgcaacccctatctttagtagccagcggttcggccgggcactctagagagactgccagggataacctggaggaaggtggggatgacgtcaaatcatcatgccccttatgagcagggctacacacgtgctacaatggcgtaaacaaagggaggcagaaccgcgaggtcgagcaaatcccaaaaataacgtctcagttcggattgtagtctgcaactcgactacatgaagctggaatcgctagtaatcgcgaatcagaatgtcgcggtgaatacgttcccgggtcttgtacacaccgcccgtcacaccatgggagtcagtaacgcccgaagtcagtgacccaaccgtaaggagggagctgccgaaggtgggaccgataactggggtgaagtcgtaacaaggtagccgtatcggaaggtgcggctggatcacctccttt

SEQ ID NO: 22 - DNA, 1529 bp, Mediterraneibacter faecis
aacgagagtttgatcctggctcaggatgaacgctggcggcgtgcttaacacatgcaagtcgaacgaagcaccttgatttgattcttcggatgaagatcctggtgactgagtggcggacgggtgagtaacgcgtgggtaacctgcctcatacagggggataacagttagaaatgactgctaataccgcataagaccacagcaccgcatggtgcaggggtaaaaactccggtggtatgagatggacccgcgtctgattaggtagttggtggggtaacggcctaccaagccgacgatcagtagccgacctgagagggtgaccggccacattgggactgagacacggcccaaactcctacgggaggcagcagtggggaatattgcacaatgggggaaaccctgatgcagcgacgccgcgtgagcgatgaagtatttcggtatgtaaagctctatcagcagggaagaaaatgacgatgccatgactaagaagcaccggctaaatacgtgccagcagccgcggtaatacgtatggtgcaagcgttatccggatttactgggtgtaaagggagcgtagacggagtggcaagtctgatgtgaaaacccggggctcaaccccgggactgcattggaaactgtcaatctggagtaccggagaggtaagcggaattcctagtgtagcggtgaaatgcgtagatattaggaggaacaccagtggcgaaggcggcttactggacggtaactgacgttgaggctcgaaagcgtggggagcaaacaggattagataccctggtagtccacgccgtaaacgatgactactaggtgtcgggcagcaaagctgttcggtgccgcagcaaacgcaataagtagtccacctggggagtacgttcgcaagaatgaaactcaaaggaattgacggggacccgcacaagcggtggagcatgtggtttaattcgaagcaacgcgaagaaccttacctgctcttgacatctccctgaccggcaagtaatgttgcctttccttcgggacagggatgacaggtggtgcatggttgtcgtcagctcgtgtcgtgagatgttgggttaagtcccgcaacgagcgcaacccctatctttagtagccagcggttcggccgggcactctagagagactgccagggataacctggaggaaggtggggatgacgtcaaatcatcatgccccttatgagcagggctacacacgtgctacaatggcgtaaacaaagggaggcagaaccgcgaggtcgagcaaatcccaaaaataacgtctcagttcggattgtagtctgcaactcgactacatgaagctggaatcgctagtaatcgcgaatcagaatgtcgcggtgaatacgttcccgggtcttgtacacaccgcccgtcacaccatgggagtcagtaacgcccgaagtcagtgacccaaccgtaaggagggagctgccgaaggtgggatcgataactggggtgaagtcgtaacaaggtagccgtatcggaaggtgcggctggatcacctccttt

SEQ ID NO: 23 - DNA, 1535 bp, Mediterraneibacter faecis
aacgagagtttgatcctggctcaggatgaacgctggcggcgtgcttaacacatgcaagtcgaacgaagcaccttattctgatttcttcggaatgaaaaatttggtgactgagtggcggacgggtgagtaacgcgtgggtaacctgcctcatacagggggataacagttagaaatgactgctaataccgcataagaccacagcaccgcatggtgcaggggtaaaaactccggtggtatgagatggacccgcgtctgattaggtagttggtggggtaacggcctaccaagccgacgatcagtagccgacctgagagggtgaccggccacattgggactgagacacggcccaaactcctacgggaggcagcagtggggaatattgcacaatggggggaaaccctgatgcagcgacgccgcgtgagcgatgaagtatttcggtatgtaaagctctatcagcagggaagaaaatgacgatgccatgactaagaagcaccggctaaatacgtgccagcagccgcggtaatacgtatggtgcaagcgttatccggatttactgggtgtaaagggagcgtagacggagtggcaagtctgatgtgaaaacccggggctcaaccccgggactgcattggaaactgtcaatctagagtaccggagaggtaagcggaattcctagtgtagcggtgaaatgcgtagatattaggaggaacaccagtggcgaaggcggcttactggacggtaactgacgttgaggctcgaaagcgtggggagcaaacaggattagataccctggtagtccacgccgtaaacgatgactactaggtgtcgggcagcaaagctgttcggtctgccgcagcaaacgcaataagtagtccacctggggagtacgttcgcaagaatgaaactcaaaggaattgacggggacccgcacaagcggtggagcatgtggtttaattcgaagcaacgcgaagaaccttacctgctcttgacatctccctgaccggcaagtaatgttgcctttccttccgggacagggaagacaggtggtgcatggttgtcgtcagctcgtgtcgtgagatgttgggttaagtcccgcaacgagcgcaacccctatctttagtagccagcggttcggccgggcactctagagagactgccagggataacctggaggaaggtggggatgacgtcaaatcatcatgccccttatgagcagggctacacacgtgctacaatggcgtaaacaaagggaggcagaaccgcgaggtcgagcaaatcccaaaaataacgtctcagttcggattgtagtctgcaactcgactacatgaagctggaatcgctagtaatcgcgaatcagaatgtcgcggtgaatacgttcccgggtcttgtacacaccgcccgtcacaccatgggagtcagtaacgcccgaagtcagtgacccaaccgtaaggagggagctgccgaaggtgggaccgataactggggtgaagtcgtaacaaggtagccgtatcggaaggtgcggctggatcacctccttt

SEQ ID NO: 24 - DNA, 1533 bp, Mediterraneibacter faecis; identical to SEQ ID NO: 13

SEQ ID NO: 25 - DNA, 3086725 bp, Mediterraneibacter faecis (residues 1-1,543,363 of 3,086,725)
gattctccaaaataaatgatgacaacagcacttgtcagtatcattagtagagtaataacatcccaacagtttttcttatataattctataatctttatttctatcagtatcgcaagtatccctgttcctgctacgtatattccaacaactaatatcagcaataaccaatatatgattccggctataaacgcattgggaatttttgtactgatctgtgccacagattgcccagcatcaatcgtccatccgataaaagtttgtatgaatgacgctgcatcatggaagaatgatttacaatcggaaaggagcacatctgactgtactgcctgaaaaagagtggttgtcagcgaataccatgcaagaaggaacaaggttgtttggaacattaccgtttttgctttatattgtcctgcaagtcgctctttttgtgtttcgtattttgcttttgcattctgatagtctgtccggtcacaggcttcacatttttcatagagtaccggcttttctaccggtatctctacgattttctgatgtgtccgggcataatcccgttgttgtgttaagcatcgtattttatcttgacattccccgatcatgacgtttgcgcttcgcagcttctctttctcgatctgcaatgctctgtctgccagcttcaagtcgttctttaatgcttgaatattcccggctttgttctctttgtttaatttctcgttcaaggtcagagattcgctgagctgcgtcttcagttcctcgataagctggtctttctgttccagttcttcttgtatctcctcggtcaagagcagaagttcttccaactgttcggcgttctttgattctctggattcgttcatctatatcacgtcctttccttatttgctgttccagttcagcaattcggtgttctgtttcagcaataaactgttttcgctgttcagagtctgtgccaatttctgccattgctgattttcgttttccaaaagttctatcttcgttttctgttcttccatcttggaaagcagttcctcggtatttggcaaaatgttgagcagctcggataactcgctgtttaatttttgcaatttctgattctgttcctgcataagagagagttgggtgtcccggttctgcatttccagaatcatttctgccattaaggtctgctgttcttcgatttgcccaatcatggattccattaagggtataatttcccggctttcttctaatgtcatttaatcgctccttccataatgataatgcacccgatacttttccaaaggtgtccagtatcttttgcaataacgtgttttgttgttttatgatttgattttccgctactttccacgaaccttttatttcctgcccggcaagaaacttttgttcaatctttcttgcgtcagcgccttcatggatggtaggaatctggagttttccctgtttttcataagaacggtgatcgacctgattatgcaaaggaagatgttcattacacacctttgcccattcactccgccacagttcacaattttttggattgttccatccggtagcatcggtcagcacccgtttccattgcaggcggtttcttgcacccatcttctgaattccgttttcgtctaatacagggatacggattccatgacggtcagggtttttcttatcctgccaccagttcggatgggattcatcaatcacgatatttccgtttttatctctgagaaaatcccaatccttgacttctttctttccccaagaatgatccgggttaaaaggacgcatagtcagaagcagatggacatgggggttgccatcccctttatcgtggatactccaatcagcacacattcctctatctacaaaagttttttgaatatagtcagttgtatattgaatttgttcctgtctgttccattctttgggaagggcaaattcaaatgacctgccaagttgggcatctgcatttttttcaatcttcaatacctcattccataacctttgtttctgaaatgtgattttaaatttttctaaagcagcttctttatcttctgatcttttgtatcggacagatttttgaaagcgttttatattttcttctggtactatctgccattcaggaggtgcgttttcacacatcatcagccgagtgtagaccacttcttttttagaagtgtaataactgattctcccggtttcctcgtttttcatcacatccccattgagatatgcggaagcggagataacagatttccctttacttcgtccgactattttgactgtgtaatgaaaaatcgccatgtctggattcctcctttctgcacatccggcatagatttccggcaacattgctttcggttttaggaaaagcagcattgccggaacgccctctgcgtaagagtgccctgcgcatagcagcctgcatggaatgcgcctctctggcgaagagtgcctcctgcggcatgagcaggtctggctgaaagccccgccgacggaacgagcccggcaagcgtgaacgcagaccggttgccacttgtggcaaacttattgggacgacctctggttgtccataagtgcgcccttcatgaaaaagcaatgaagggaatgaaaaactcatcccctccgccattacacttcctccatatcggtattgacttctttctgcattgcctttgagaaaaatttcccgttggcttcctgccttttcagaaaaccaatcagctttgggatgtcttcttcctcaataggcgcaccgagaacggattccaccgcaccgccaatctgacagagcctatgggttcgttttttactttcttcggctttctttcgcttcagaagttctttcttctgtgccgcatatcgtttcgccttttcaaggctttcctgctctttcttttccatttcaagcattcgtgcttcataactttttgttgattttgccattcttacattctcctttccttcacaaacataagttcttggttgcgtatcagaagaagcacatggtataatcttcttgcgtgtaggtatatcatggcttcggtttgatagaacctttggcggtttcttgggaagccgcctttttaatttgccgcagttcttgttacggcttttacatttcctctatccctcaaatcacgaccttcattcgcttccataaacatttccagaatatcggttttaatcaggactttacgaccaacctttaataccggaagtttcttccattctacaagctgtcttaaggtgtttctgccgattcccgtatagtcggcagcttcttcgatggataatgcaatttttctttgcgtcatataatcacctccttataaattgcattatgcaattcctgtgatgtaagtatatccttttcacatctttttgtcaagcgttacgaaatgttaaaaataaatattgcattgcatattgcaatttcggaaaaacaatgctataattcatacataccgaaaaaggaggcagtcagcatgaaagataaagaattacgcaagctgataggcagcagaataaaacagcgccgtctggaattgaatctgacacagccttatgtcgcagagaagatgggagttaccgcttctacaatcctgcgttatgagaatggttcgattgacaatacgaaaaaaatggtgctggaaggtctttcggaagcactccatgtatctgtggaatggctcaaaggggaaacagatgaatatgaaaccgacattacggataagagagaattacagattcgtgatgcgatgggagatattctggaacagttaccgcttgcccttaccaaagaagaagatgctttttcaaaagatttattactgctgatgttaaaacaatatggtctgtttttggattccttccagttcgcctgcaaaaacttcaagggaaatgctggtcagacggatattgccaaaacaatagggtttgaatcgaatgaggaatataatgagattatgttcttaagggaaatcactcataccatcaatgcttttaatgagatggcagacattgtaaggctctattccaagaaaccaaaaacagcagaacaaaggcttgcaaatcttttatcagaagtcttatacgaagattccgaatcggtatagtaagacaaccggagttatgatatacttacacgcacgaagcatttcatcagttccgattgtctaatatcgaaaggagacatacgattatggcaaaaggatctgtaagaaaaaaaggaaagaaatggtactaccgcttctatgtagaggacgcaagcggcaatcttgttcagaaagaatgcgttggaacagaaagcaaaagtgaaactgaaaaactgctccgtcaggcaatggatgattatgagaaaaagaaatttgttgccaaagcggataatctcacagtcggacagcttttggatgtgtgggcagaggaggaattaaaaacaggtacgctcagcaatggtacggtggagaattacctcggaacaatccgaaatattaagaaacacccattggcagaacgtaaactgaaaaatgtaacctctgaacatttgcaatctttcttcgatttgctttccttcgggggagttcatcccgatggaaaagagagaaagggttacagcaaagattacatccattctttttccgcagtcatgcagcaatcattccgctttgcagtatttccaaagcagtatattacgttcaatcctatgcagtatattaaactgcggtatcagacggatgaagtggatttgttttctgatgaggatatggacggaaatgtccaaccaatttcacgagaagattatgaaagactgcttgcttatctgcaaaaaaagaacccagccgcaatacttccaatccagatagcctattatgccgggcttcgtattggagaagcctgtggtttggcatggcaggacgtaaatctggaagaacaatgccttaccataagacgcagcatccgatatgatggctcaaagcgcaaatatatcatcggaccaaccaagcggaaaaaagtaagggttgttgattttggagatacactggtagagattttccgtaatgcccggaaagagcagttaaaaaatcgaatgcagtacgaagaactttatcacacgaactactacaaagaggtcaaagagaaaaacagagtgtactacgaatattattgcttagacagaacgcaggaagtcccggcagattataaagaaatttcttttgtctgcttaagaccggatggttgtctggaacttccgactactttggggacggtatgcagaaaggtggcaaaagcattagagggatttgaaggctttcatttccaccagttacgtcacacctatacaagcaaccttttagcaaatggagcagccccaaaagatgtacaggaattgttgggacactcagatgtcagtaccacaatgaatgtctatgctcactccacaagagatgcgaaacgaaaatcggttcggcttcttgataaagtggtaggtaatgactaaaaaaattcccttatttcccttgtgattatctcataagggcaaaaataagggaaactacatatcatttcactaatggacaggcggaaaagcctgtaaaatggggaaagttagaggaataattatataaatttcagttttttcattcaatcacatcctaataatacttccaggtctactatttctaagtattctactcaaaaaaattttatatcgctcatttatttttacactttttcttgatcaaaatgtaaaaatttcatgatcttttctatattctcctttgtccaggcggtaatctcgagcactgcatccggtatctcctggtctccggaatccggattatgcatccagatacatggcatcttagccgccttagcagcctttcctccattcgttgaatcttcgattacaatacactcatctaccggtacgcccagctgcttcgctgcaaagagaaatgtatccggtgccggctttggattcttcacttcatctccacttgtcatgacatcaaaatatttcatcagatccagcgtttccagtgtctctgtgattacaggtttcggagaagaagaggccacggccaggcgataccccgcatctttcagacagcaaagcatctgccctactcccggcatctcagggaatccgtctcgcgcaataatttcatctttcttctctttcataatctgattcataacttcaagactttcaaatgtgattccgtaattttctttgatcagattcatgaaatggagtcttgtagatccaatgcatggtttatatacatcgtaatctaagtcaattccatatcgttctttaaaaatctctacccaacattgataatgaagcggttctgtattgatcaaaaccccatccatatcaaaaatcactgcttttatcattcttatatcccaactttctataaaagattaatgttaatgtggttgctacgatccaaccaaatggccatgccatccagattccggtacttccaaagctttttgtcaaaaccaacgcaaatccgattctcaaaataagatccggaactgttgcaactacaaaataaaccatcgctccggaacctcggataattccatctgtcatcagcttaattacaatcataaaataccacggcgatactattttcaaaaatgccattcctgcgctgatagcctctacactctctgcacctaagaatagccccatcatctgacgactgaaaatgaaatacagaataacaaacggtaatgccgtaagctctgacaatttcactccggtacggaatcccaatggaattcgttctttctttcccgcgccgatattctgtgccgtataactggatagacaggaaccaagtgtcataaagatattaatggcaaatgtattcagcttgattgctcccgaatatcccgcaacaactgctgaaccgaattgatttacaattccctgcacaaaaagatttcctacactcaatacgctctgctgaagaatgcttggaattgcaatcgccatgatctgtgcaaataatttcttatcaaaccacggctgcttttcttccccggcaaatttctgcaatcttccgagaagtgttactaatgcaagcacggctgacacaccttgcgcgataaatgttgcccaggcaacaccgctcacaccccaatggaattttgctacgaagatgtaatcaagaataatatttccagctgaggaaccaagcagaaaatataacggtgtcttagaatccccgagtgctgtaaatactccggtacacacattataaagcatcaggaagataattccgaaaatgtaaattttcaaatataaaactccgtctgccataatattctgtggtgtgcggatccatctcatcatctgatgattaaagaaatacccgaataatgtcagcatgattcccagcaccatagaactaagaaatgctgttgtaaccgcacgcttcacaccgccccggtcttccgctccgaacagtcttgatacaactacggaggcccccagattcattcccacagcaaatgccatgaaaataattgtgatcggataagatgcgccgactgctgccaacgcattttctccggcaaatcttcccgcgatcatactgtctgcgatattgtaaatctgctggaacatcacactgaacaacattggcagaaggaaccgccataatgtcttattcggatgttctttcgttaaatctgtaaccatactttcccctctctcattacaaactctacaatccaataattctataaatttctttcatatccagactagcacgaacgatatctgcaagcttatcatactgttcttccttataagacttccagtctactgcctgtactgtctctggatcatatcctttttcttttaataaagctgacaagaaaccacctgacatttccggagaatcaaaaattccatgcacataacagccatagacattttccttctgtgaaccatccggatgtccttgttgtagcgtatcagaatcattttctattgttacaagcccggatgcgtgctcatcaagaatcgtctctcccatatggatctcatatccttcgaaaggaagtccctccatctctttcaggattcctttcatctcgccaaatgttccatgtactctggttctgtgtttttccggacggaacacggtctttgtatccaaaagtcccattccctgtacagttcctccatactcttctcctgttggatctgagatttccattccaagcatctgatacccgccgcagattccaaagaccggtttgttctgtgcgctgtgtttcagaattcttgcttctaatccattctgacgcatccacagaagatcgctgatcgtattctttgttcccggaaggatcaccgcatccggatttccaaactcagccggagatgaaacataacgcacgctcacctcttccaatgcttctaaaggtgctaagtcagtaaaattagagatccttgggaatcggatcactgccagatcgatcagtcccggtttttcttttttctgaaatcgttccgtcagactgtcttcctcatccagatctaaataaaaatacggaactactcccgttacagggatatccgtcttatcttccaacattcgaagtcccggttccagaatggatacatctccacggaatttattaatgatcgttcctttgatccgcgctttttcatcctcttcaagaagcattacagttccggcgatctgggcaaatactccaccacgatcaatgtctccgacaagaagaaccggtgcgtctgcaagctttgccattcccatatttacaatatcatcttttttcaggttaatctctgccggacttccggcaccttcaattacaatgatatcatactttttttccaactcatgatatgcatccataattgccggaatatattccttcttatgacggtaatactctcttgcagccatcactccgattggtttaccattgataatcacctgagagcctgtatcgttcgtcggcttaagtaaaattggattcattattgcttccggttcaatccctgcagcttctgcctgcatcacctgggctcttcccatctccagtccttcttttgtgataaaagaattgagcgccatattttgggatttgaaaggtgcaactttgtatccatcctgtttcaggacacggcaaagacctgctgccagtgcgctctttccgacatttgacatcgttccctgtatcataattgatttcgccatatttttcgcctccttcactgctttgacaggattgtttcaagtgcccgtaaaagaacatcattttcctcttttgtccgcactgcaatccgataccagcctttcttcaaccctctatagttctcacaatttcgaatcaaaatcccctgctctaacaatcgttcaaacaatgcgctttcactatataataagaagaaatttgcctttgttggaataaatctaatctcaaactcacgcattttcttttccatgcgcattttttcttccacgattttgtttcgtattttctgaactctctgctcttctctttctgtcagcgcttctatccctgctgcctgtgccggaaccgacacgctccacggctgacggatctgctgcatgctctctcgcaactttgcatctgatgtcatcgcatatccaagtcttaatcccgggattccatacatttttgtaaatgcctgtacgagaaaaagtctcggatgatctgtcacctttttcaccatggtatatttctgcgcttcttccaggaattcgataaagcactcgtctaaaacaagacgaatcttcttttcttcacatcgcgtaaggatctgtttcatcaactctggttcgatcacctggcctgacggattcgatggggagcataaaaatacaagatcaatatcctctgtcagttcttccaaaaagctttctgtcaatgcaaagttattctctcttttcaactcatgataaatgatttcgcagtctaccgtccgaagtgcctgttcatattctgcgaaagccggaatcggaagcaatgctttctttggtttttctgcaagaacaacagaaaagaacagctccgctgctccatttccgaaaaggaaatattcctccggcagactttttttctctgccagtctctttctgagccgtctgcattgactgtccggataaaggctcacttcatccatcgatctttttgccgcttcaagaacttcttctgacggaccgtaaggatttacattaactgaaaaatccagcacatcaccatatgtataaatgtctcctccgtgtacatattccatgaatcttacccctacttctctatgtatgtcatttttaatctaaaagtactgcctccagttcctcgcgattctcttccatccatttgattggctttggatgtttaatctccggatccagaagcttttccatccagaccatattataccagcggtcaaatttgtatccgcaatgatagaattctcccaccatgcggtacccaagatgtgcatggaactgtgcgctgttctttgtcagatatttatcttcaatctctggatatccaatgcatgcatatagattgcaaatgttctgagcgtgcagtactttctccagtgcctcatacagctttttaccaactccggttttctgccggtcttttcttatataaattgttgtttccactgcccagtcatatgccgcacgacctttgaatgcccctgcacagctatatccaagaatctcgccattctgttctgcgaccagatacgggtactttttcatcgtctgacgcattcgatctttgaattcttccagtgacggaacttcatattcaaatgtaatcactgtatccgttacatacggtgtatagagcgccagaagttcttctgcatcttccatttttgcaaatcgaatcaataaatccataacaataaacctccaaagacaaccatcatcagtatcgttgtcatatacattaatttcccggcacgaagaatatcctccggttcaatcttacggattgcatcgccgatataatcctttttatagactttcccgaaataaaccgcatccccggctaactgtacatcaagcgctccggcgcataccgcctctgactgggcggaattcggacttgcatgttttctcttatcacgcagataaatcttccacgcattctctccatccatccccgtcaaaaatgctgcaacaatcataaaccacgcagtcaacctggctggaatgtaattaaatacatcatccatctttgccggaattcttccgaaatacagatatttttcatttttgtatccaagcatagaatccatcgtattcactgctttatataagaatccaagcggtgcaccgccgatcagaagaaataaaagtggagccgtcacgccgtcggaagtattctccgccactgtctctaccgcagctttcgtcacaccttctgctgtaaggttttctgtatctcttccgacaatcatggatactgcctttcttgcaccaggcaagtcgtcttcttttaatttctgataaaccttcctactttctcctacaagacaccgtgccgcaaatatctggtaacaccagaaggtttccaaaagaaaccgtactgccggatgaacctttcctgcagcaaataagagtaccgccggtacaagaaaggataacgaaactgtcagaatccataaaattccacctgccagaacttctcttctgtttttcttctcttgttctgacgcataaatccgactgcacgacaacttccgcaatcctttttccaacacactgatcaggtttccgatcacgcgtatcggatggtacatccagaccggatctccgaaaatgcaatctaacagaaatcctgtaatgcatgccaagattgtcatcttcccattcattctatcgcgcctcccagtttttgaatttcataaaatctgtgaacgccggacttccactcttcttcgtcaacaagcattctatatcctccgccattttccacctgccagtgataaaaatctttttggtcttccgccagttgttccagcacagccataatcgttcctccatgaacgacaaaagctgcactttctacattttctttgcataatctatcaacctgacagagcatgcctctcacacaacgtgaacggaattccttctgttcctccccttccggaaatgcaatcgttccaccggaatccagccatgcctgatattctgctctgtctttcagttcttcatatgtcttacactcaaagataccaaaatcacattctttcagcaacgattcctgttgtatctgcacctctggataaatcaactctgccgtttgaatacatctcttcattgggctgacaatcacttgctgtacctgtggatagctatctattttatatttctgtttaaagttcagtacttcctgttctgatagttcttcatctgtacttccaatatattgtctcttttcattgcccggtgtcttcaaatgccggatcaaaataagctccataaatcactccaaaaaaatctattttatttcattttcatttctataataatagcatctatcataaaacatttatatgcaataacatttctagaataatgcaagcactgccagcataaacagttcacataactgcaggaagtatccggcaagatcacccgtaatacctccaaactgttttctgctaaactgataataataaaagaaaacagcaagtccgacaactgctgctgccactccgcataaacctgctgtcagatagaatccaactccggctgccaatagccagaagatcaatacaatccttacatttctcttctgtgcaccgtcttgaaatgtcctgagcagcccactgttcttcgccgccggaaatgtcacaacagaaatcccactcaatgaacgtgaaaacacgaacacgagtgctgctgcaaacaggcgttctgttctcatttcactaaaaatccccacgcacagaaggaaataacagcaaagactgatgatcgcaaatgctccagtatgtgggtctttcagaatctccagcttcttctcccggtctccataagaactttttgcgtccatcgtatctgcgaatccatccaggtgaatcccacctgttacaaagacaggaatcagcgtcaacacaactgcacaaagaaatgttccttctcccttccacagtgtaatcagattccctgcaactgcctctagtacaccgattataacaccaacaagaggaaaaaagcacatcgcatatctcatatttttttcattccagtcaacccgcggcatcggaatcttagaatacattgcgattgcaatgatcattgcgttcaataaccacatttttcttactcctcatcttcacttaagttcttcatactgctctactttaatctcttcaaaggtactcatcttccgataaacattcacacccatctcaagaagtggaattgctgcaactgcaccactgccttctccaagagacatcttcgcgtcaatcagatatggaagtttcagctcttctaagaccattcgccccgccggttctcccgagcaatgtgatgccaggatataatctgccgtctccggtaccattcgtactgcacataatgctgctgcagaagagataaatccatcgatcagaaccggaatatgatagatcgcaccgccaagaaatgcacctgtcattccggcaatatcaagccctccgactttggataagacatctaaaacatcttccttgtccggctgatgcttttcaattgctctctcaattgcacgaatctttctattcagcccttctgaactaaggcctgcgcctctccctgtcacattttctacactttcatcaagcagaacggacacaacagcactgctggtcgttgtatttccaatccccatctcaccggttgcgatcagatcatacccttgttctgccagctctttgacctttcgtatgccaataagaacggcttgtgcagcctgttctcttgacattgcaggttccatcgccatattctttgttccatacatcactttgtctttcggatctgtcaccgacggaacatctgtcaccattccaatatcgattggaaataaatccgctccggcggtctctgccataatacatacgctcgtcgcacattttgtaaaattatccgcaacgattgctgtcacttcctgtccggtctgggtcactccctctgaaacaactccattatccgcacaaaagatcagcaagcctttctttttaatctcaaaatctgcttctcttcggattcctgccattcggatcacagcatcttccagttttcctaagctgaacagtggttttgcaactgttttccatcgtctttttgcctgttcttcataggatttctccaccggttttatcgttttgaatttttcaatcaataatctttcattttctttcatcgacatcttttcattttttgtcgtttttctttcattatctaccattgttatgtctgcttttcttttcattttcttttaattcacagtttgtctttctaactatataagccagtttttttcgcattttctggcatcatcctcctattttatcataatttttttcattctgatatataaaaaagcaacggaatctgtcatattttccttgtaatttttcattttttgacatttttcttttttcttcttgcatttttaatatgaaatctttcatttttcccagttctttgttaaaaaatttacgggatttttattgattttcttcacataatatgtataattaaaaaaggatatgaaaagcttgcatgagcagcattttattctatcactagaaagaaagaggtatatgtaagatggcaaaaattgatttaagtaagtatggcattactggaacaacagaagtcgtatacaacccttcctacgaattattattcgaagaagagacaaaaccggaacttgaaggttttgaaaaaggacaggaaagtgaactcggtgctgtcaatgttatgacaggtgtttacacaggacgttctcctaaagataaattcatcgttatggatgagaactccaaagatacagtttggtggacatctgatgaatacaagaacgacaaccacccggctacagaagaagcttgggcagctgttaaagatatcgcaatcaaagagctctctaacaagagacttttcgttgtagatgcattctgcggtgctaacaaagatactcgtatggcaatccgttttatcgttgaagtagcttggcaggcacatttcgtaacaaatatgttcattcagccaacagaggaagaacttgagaacttcgagccagatttcgttgtttacaatgcttccaaagctaaagttgagaactacaaagagctcggacttaactctgagacagctgtacttttcaacatcacaagcaaagagcaggttatcgttaacacatggtacggcggagagatgaagaaaggtatgttctctatgatgaactacttccttccacttaagggaattgcttccatgcactgctcagctaacacagacctcaacggagagaacacagcaatcttcttcggtctttcaggaacaggtaagacaacactttccacagatcctaagagactcctcatcggtgatgacgagcacggttgggatgacaacggagtattcaacttcgagggtggatgctacgctaaggttatcaaccttgacaaagagtctgagccagacatctacaacgcaatcgttcgtgacgctcttcttgagaacgttacacttgataagaacggaaagatcgactttgccgacaagagcgtaacagagaacactcgtgtatcttacccgatcaaccacattaagaacatcgttcgtccagtatcttctgcaccggcagctaagaatgtaatcttcctgtctgcagatgctttcggagtacttcctccggtatctatcctgacagaggatcagacacagtactacttcctgtctggatttacagcaaaacttgctggtacagagcgtggaattacagagcctacaccaacattctcagcttgcttcggacaggcattccttgaactgcatcctacaaaatatgcagaggaacttgttaagaagatggaagttagcggagctaaggcttaccttgttaacacaggatggaacggaacaggaaaacgtatctccattaaagatactcgtggaatcatcgacgctatccttaacggagcaatcaacaaagctcctacaaagacaatcccatacttcaacttcgaagtacctacagagcttgagggtgttgacacaggaatccttgatcctcgtgacacatacgctgacgctgctgagtgggatgttaaggcaaaagaccttgctcagagattcatcaagaacttcgttaaatacgaaggaaatgaagctggtaaagcacttgttgctgcaggtcctcagctgtaagattgttcttgtattccaaaattctgggattgatagaataaatatgtgaatagaagctgtgaaagatgaaattgcttatctttcacagcttttttatatattaggaaagtcctttcctaatatataaaaaacgctccgctcaggatgcgcactgcggcgtacaaggtaggtgtcgcaagcgaccgccgcaggcgcaagaatgtgccaaggcacattctttgttcttgttgacttctttttctaaaagtgatatcataatgatatcaaataaatttcattttatttccagaggaggaatcactatgaatgaaaaaatattatcaaataagaaaaacggaatgggaatgcttctgctcttttgtctgctctatctaatcgcaatagcaggatgcgttctgtccgcaattgcactggaacatgaattctcagctccgccggttatcgctggactggttgtcagcattatctggctgtgcatcggatgggttccatttcttggattgaaggtgctgaaaccacaggaagctctggttcttacactttttggaaactatatcggtacactgaaagaagccggattctattttgtcaatccattctgtaccagtgtaaaccctgcttccaagacaaagttgagtcagagtggagatgttgataacaattccaagaagggagcaaatctttccagtctcctgggtgtttctacaacaggaaccactgaagagtcttcaagcaaaaagatttctctcaaggttatgacactgaacaactcccgtcagaagatcaatgactgtctcggaaatccgattgagattggtattgccgtaacatggcgtgtcgtagatactgcgaaagctgtctttaatgttgataattacaaagaatatctctcacttcagtgtgatggtgctcttcgtaatattgtccgcatctatccatatgacactgctcctgatgtcgatacaaccggtgacggaaaggctgatgagggaagtctccgtggctccagtgagattgttgcagcgcgaatccgtgaagagatccagacgaaagtgacagacgcagggcttgagatcatcgaagcaagaatcacatatcttgcttatgcaccggaaatcgctgctgtcatgctccagcgtcagcaggcttccgctatcatcgatgcaagaaagatgattgtagacggagcagtcggcatggttgaaatggctttagatcaattaagtgaaaaagaagtggtagaactggatgaagaacgtaaggctgctatggtatccaatttactcgtagttctgtgtggaaaccatgacacacagccgatcattaattccggaagtctgtactagatatggctgaaaaagataataaaaagaagcaggttcctctccgtctctccgctaaactgtatgacgcaatcgcagcctgggcagaagatgattttcgttccgtaaacggtcagattgaatatcttctgactgagtgcgtcaggcagcggaagaaaaatggaaaatatgtttccgaacatttggacgaaccgattgatctggatatttcatagagcctaaaaaaacagcagcagatgttattataacgacatctgttgctgtttctctttgttctattctctgtaaccgcttctgcatttttctacaaaacgctccgcaaattctttacaagatggataatacaaatgcggatatcccgccacgagattctcttccatatgtatgcattcccattttctctttccatccggcttgacagcaagacagtcacttccactgtctgtgctatcccagtaatgaaactcgtgtgcacggatattctcacccggaagaatccagctgtccgctatactcatccgttctttaagctcagaaacctgattctcatcaagattcctctgtaaattcacatatccaaatcgaaccagtttacctgtcggaaatgtttttccatggattcgccctactaatttccaaacatttccatctgcatcctccatttcttcatgaagatacataaatccaccacactctgccagacatggaatcttatcatccaatgctcttcttattgattcaagcatgctctgattttctgccaattcttttccatacagttcaggataacctcctccgagtatcaatccactgatattatccggaagtttctcatcccggagcggactgaattctatcagttcacagccaaagctttctaatagttcaaggttatctttgtaataaaaacagaaagcttcgtcacgcgccactgcgattcgaactggatcgttcttactttttaaatttccaaccttctccgattcttcaataacttctgttttccatactgctgcttcaccggcaatcttttccagcaattcaagatccactgtttttgccagaatttctcccgcctgtcttaccttctcctgcagattttccatttcctgcggtgttacaagtcccagatgacggctttccagatgaaaagcttcattttccggcatgtaaccgacaattttaatctcgtcatgcccgattctcgccagttcattctccaacatttcttttaatcttggatatagcattgcggatactctgtttaagagaattccacgaatattgctatccggacgaaattcaacaattcctttcaccgtagctacaagtgtcattgctgcacctctcgcattaatcacaaggatcactggcaatcctagcgtctgtgcaacatcataagaacttccttttacagaatcaagtgacattccgtcatagaaccccataacgccttcggttatagtaatatccgcatctttcgtatgctttaggtatccctctttcaaaatgtcttcttccgagaagaatagatccagattcttagaatcaacgccaagaacctccctgtggaacattggatctatataatccgggccgcatttacacgcacatacacgctttccctcttgcttaaacgcagacatcaggccacaggctgcagctgtctttccactattactggaaacagcagacaacaaaaaccctggattttttttctgatttttattattgcaagcattctctttcatttttctcatgattctcctgtctgtttgtttccttttctctcatcttatacctgtccaggctttcttccacctgcggaaataatataaaccggattttgtcccatcatcatatgatatcttccaagaacctttgatcttgctgcactcacttgcagaatctccgcatctgggagaaccccttcgtccacaagccccatcacttcactgactgtttcaagtgaaatcgcattgatcacgattcgcacatccggatttttcctctgaagtaattggacaatttctcgtaagtttcccgaacttccaccgacaaatgcatgtgtcggtgtttccagtttctctaatgtctgtggcgcaaacccttctatgattcgcactccgtctgtcctaaatttcttccgattctgatcgatcagtttcactccttccggattcttctcaatcgcatacacacggatctgctcacttgcacgtgcaatttcaatagaaacggaacctgttccggcgccgatatcatacacaattgcatcctcggttaattcaagctctgctatactgacagaacgcacttccgacttcgtcattggcacctttcctcggagaaattcttcatctttcagatgcataccggccgccttacaataagatggattttctacaagaactgcgcaaagtccttcaaaatcttctgccttcatctcgtacaatttgcccgaaagtatcttttcttcctcataagacatctggcgtcccacatgaacctgcacattttctaagccatactctagtaatgtctcatagaaatgacgccccgtgtcttttcctccgagaagcagaaaggtcttagaatgtctgtgaatcgtctgtacaaaattcatgtcttttccatgaaggctcagaatttttgcatcttcccaggaaacaccgacttttgatgcaagataagaaagtgaggaaatcccaggataaatttttatttggtcagaacacacttccgtcaatcgttctttcagttttttcgcaccactataaaatcctgtatctcccgaaagaagaattcctattttactatgttctttgtgctcttttatataggatacaatctcttctgtacgatattccttaataaagactccttcattcctgttgtttctctcacactgacgcatacttaatccattcatgctacgaatcttctgcgcactcgtaatcattcgttctgctccgatcagacaatccgcctcttctatcaattgtctgacttcttctgtgattacatcaccagatcccattcctattcccgcaaggataatttgtcgtgattccatttcatctcccactatataactatttttcccttgattcttttggtttctatctgctataataaaatctagaaacgggtttttaccacacttcttgttgtggcctgcccgtttcttttttcttataacagtttataccccctcggcgtcaccatccgcccattcagttccatcgttcttgaatttccgataaacacggttgtaaacatatccacctttgtatctctaagttctttcaatgacagaatctgataagtttctccttcacgtccgatattcttcacataaccgcagatatttcccacatctctgtactgaagcagtatatcacaggctttctgcagataatctgcgcgcttcttacttgacggattgtaaaggcagatgacaaaatcagccattcctgccgcatgtagacgcttctcaatcgtctcccacggtgtcagaaggtcacttaaactgattactgcaaagtcatgcatgagcggcgctccaagaacagctgcacctcctgatgccgctgtaattcccggaacaacttctatctgaatctcagggtattcttttcctatctcgaagatcaatcctgccattccatagactccggcgtctccgctacagatcattgcaacgtcctgacctttttctgcttcttcaaaagccattctgcagcgttccggttctttccgcatcggagtgctcaaaaatatcttatcaggaaactgctctttcacaagatcaatataaacattgtaaccgatcaaaacagggcaatgctccaatactttctgtgcacgcactgtcatctgctcttctgctcccggtccgattcctactacatatactgtactcatttgctctgcccctctgcttcctgtctcatctctttgctttgattctctccggtttgtcctaattccttcttagaacaggatgcttgtctgaattctgtcgtaaatgtcggatcataaagctttgatctctcataagtcccgtcaagcacttctccgactacgatcagcgctgtcttggtgacatccgcctcacgtgcagtctgttccagcgttcctaccgtacaacaaagtactttctgttctggccaggtcgctttataaacaatagctgccggtgtatcttcgttgtatccgccttcgatcaattctgctgaaagctctttcaaaagccctgtactcaagaaaagtaccatcgttgcctgatgtgccgcaaagcttctaacggattctttctccggcaccggcgttcttccagccattctcgtaattacaactgactgggagattcccggaagtgtgtactccgcttccagtgctgccgcagctccgcaaaatgaactgacacccggacaatcttcatatggtatctcaagtttcttcagttcatccatctgctctcggatcgcaccataaaggcaaggatctcctgtatgcagacgtacgatttcttttccgtccccatgacccttcaccatcacttctaacacttcttccaatgtcatctttgcactattatatatctcacacttttctttacacagtttaagtaatcccgggttcacaagagaacccgcatagatcacgatgtctgcttctttcaaaagtctttgtccgcgtactgtaatcagatcttctgctcccggacctgctcctacaaatgtaatcataattcttcctgccttttctatcttttcctgtcttttacaattagaagggaatagtatcccgcatcttctgaaatctcttctgccgtccgaataatctgttcatgatccataccacagttttctatgagacaaatatcttgtccgctttctcgtaataactcttttatctgtcccatttttcttccggtcttcatcagaatctttgttccaggtaattgaataccttctcccgcttcataagaccccggtaaaatatggatctgatcttcctgctctccaagtggctgatttaatcttgccgccgctgcacaaaatgacgggattccggaaacagtttcaacaggatacccctgttgttcgatcatctgttccacatacatacaagtggaataaaccgtcggatctcctatggttaaaaatgctatactgtacccttgttcaaggaattgccctatcgtttccgcgccttttgcatgaatctttctcaacacctttttgtccttaatcatcggcattggcagaaagagaatctgctttttctcaatctccggaactgcttgtactgcaatctgatatgccgtacagccttctaaatatcttaacgccttgttctcttttccattttgctcaagcaacattggctctgtcaattctctatttgaaaccggaagtactattacatcacagtccctgattgttcgaactgcttttaatgtcattaattcaggatctcccggtcccactccgattccataaaattttcctgcttgtttcatctattctcctgtatcttctttaacaactcatccgcattttctgactttccaagaatgccatcctctgttgaaaataaaatcacaccgatttttaattcctcgccggctctgttctttataaagaattcaatccgtttcattacactttccatcaccggtttaaccagattttctcttcgcagtatttccattgcttccgttgtattgatacaatccatgatttcccgcacaactgctgcatctgcaccattcattgctgcatgcacaccaagcacttccattcgacaatctgcctgtctggaatgcgtattcatcactcctgctgccagtttgataaacttaccaatatgcccgatcaagagaatacctttcattccaagaaactttgcatcctcaattgtctcaccgacataattactgcattttacagaaagtgccgtatctacctgcagtttctcccttagaaagtccataccataatttcccggaacaacataacaccaatctgttccattttctttgagcatcttcatttccagataaatcgtatccgtcagtgccttctcactcattggttccacgatacctgttgttcctaagattgagattcctccctcaatccccagtcttggattaaatgtcttctttgcaacctctgccccttccggcacggataggcgcacttgcagatttcctgtatattcatacttcctgcaaacttcttccactgcttcacagatcattctccgcggtactttgttgattgctgcctgaccgattttctgttccagtccaggcttcgttacacggccgattcctataccaccatccagattgattttctcggaaagatccacactattctccgaatttattttactcttcttctctaccttttgaactgttgcataaacaagtattccattcgtcacatccggatcgtctccactgtattttcgcactgcacatgaaacttctgacttcctacgcatgatctcttccaactcaagatacagttcaatgcccttcggcgtcagcagtctcacctggcgaatctcttctcccgacaataacatctctgctgccgcttttgccgccgctgccgcacagcttccggtcgtatatcccatctgaagtcccgatcttgttcttccgatttccttcatcaatattcaatcccttttctcgcgtagattccctgatcaaacggatgcttcactttcttgatttctgacacataatctgccagttctacaagcttttcatccggatttcgtccagtcaatacaatctccagttcttttggtttcttctccaggaactcgattgcttcctccttcggaatcaaatcatacttatacgctgccataaactcatcgattacaagcacatcatatcttccggtaagaatctccagttcaatcgctctccataaccgcagataagtttcccttacttcctgctttttctcttcggaaagatttttaaaaaagccataagacttttcaagatgaagtactttaatctgagaaatatcatcgagaatcgccagttctccggaagattcattttttaaaaaccgggtaaataaaaccttaagtccacttcctgcagcacggactgcaagtccgattgccgctgatgttttcccttttccatctccacaataaatgtgtatcaatccctgttccattttctcatctcctgttctgcttcctctaccgacaagccttcttctatcggccttccaattacaagaagaactgcacctgcctgctctgctgcttcaagcttttctgcaaatcctccattctttccggattcttttgttacgaaatattttgcctctgtctgatgaagaagtgcaagattcatttccctggaaaacgggccctgcattgcaatcagatgcttccctgaaaatccgagatctatgctctgcatcactgaaggaagtacggaaagtactcttgcatagcaccgctctttataatttgtcaaacgagtatatttatccagttctttactgcctgttgttatcagtatatttccctgcgtctgctcgagatagtccacggcctcttccacgctattcacacagactacagaactgtcactcttagcaatcgcatttgttctttcacaagcaagtttttctgacctgactgcctttgcttctgtcaaaaaatctcttaaacatcgtaaatactctattccgctgtttttacatgcccgctgtatattttccgtcactataactgcaaacggatgcgtcgcatctatgacaagccccacctgctctttttcaaagaatgcttccatctcctgctgatccatacgtccgtgaatcactcgaagttctgattgcttatgcttctcttttcgcaactgcagatcattttccaatagttcttccccatattctgtcgcagcacttacgatacagggaattccttctttaacggcgtattctgccagctgtcgtccctctgtcgtaccggcaaaaataagaatatttttcttcatcaaatcacccacatttacatttatttaataaacttatcgattgcctcgtcaagagcacggattgtctccatatcattctgctcaatagcttccacaatacaatgatccagatgattctttaaaatcacttttcctgtattattgattgcagaacgaactgccgcaagctggatcagtacttcactgcaatcttcatcgcgctccaccattcgcttcactgcctcaagatgtccgattgctctggataaacgattcattaccttcttcttttcttctgcactgtgtacatgacggtgaacatgtcctgtgccgccatgatcgtgatgatgtacatgtgactctgccaccccatctccgttatgatgcacgtgggtatattctgttccgtcctcacggaaatgcgtatgctctttcataatcatccatcgaaccctttctttttactctgtcactgattataaagcaaaaacactttttcttcaacttgttccgcataagttacttactgttcatactgtgtgcgaccggcaaccacaaaattttctcttgcatttttccaaaagccgtgatatcttaatatgcaagacaaagacgtctgacagaaaggtaagagattgcctttctatcaggcgtcttttttgcattatcagatgaattgggaggatttagaaaatgaacaccggaaacactgcttttatgatgatctgcactgcgcttgtcttctttatgacaccgggacttgccttcttctatggcggtcttgtgcggagaaaaaatgtatgtaacacaatgatggcctgcgttgcgatcatgggactatctgttcttctttggaccatgtttggctattctctttcttttggcggcaaccacgccggaattatcggagatttccgctgggcttttttaaatgatgtcggctgggaagccggtccgtatgcggataccattccgcatcttgtatttgctgcattccagatgatgtttgccatgattactccggcactgatcaccggtgctgtagtcggaaggatgagatttaaggcattatttgcatttattgcactgtggtctttcctcgtttactatccgatggctcatatggtctggggagagggaggattccttgcagcaatcggctccgttgactttgcaggcggaaatgtggtacacatcagttccggcgtcagtgccctggttctcgcaacatatcttggcagaagaaaaggatacgaaaaaacatcttaccgtatccataatattccttttgttgtgcttggagcttccctgctctggttcggatggtttggattcaatgcaggaagtgccctggcggcagatggacttgcagcccatgcatttatgacaagtgcaatttcttccgcagctgctctcgtatcctggatgctgatcgatgtgatcaaagacgggaagcctactctggtcggtgcttctaccgggctggttgtcggactggttgctattacaccgggagcaggatttgttccgatctggtcttcctatatcatcggtgcactggtcagcccgatctgctactttacaatgaacttcattaagcataaactgaaaatagatgatgcactggacgcatttggctgccatggaatcggcggtgtatggggtggaattgcaaccggactttttacaaaaacttctattaactctgttgcaagatgggacggactggtcttcggtaatgttcatctcttcgttgcacaggtattaagcattatcatcactgcggctgttgcagttgtcggtactctgatctgcattggaattatccgtatcttcactccactgcgcgtagatcagaaggaagaagctcttggactggatatctcccaacatggtgaaaatgcatatccgtccttcaacggattcgactaatataatctgtccaaaatttatatatccattaatacaggaggatttttaaaatgatgattaaagtagaagctatcgttcgggaagagaaatttgaggatgtcaaggctgccttaaatgaaatagaagtcaatggtatcactgtctcccaggtcatgggatgtggtgcacagcgaggttataaggagattgtccgtggttctgagattgagattttcatgcagccgaaaatcaaatttgaaattgttgtctcttccgaagaatgggagaaaaaaacaatcgaagcaatccagaaagctgcctataccggtgaagtcggtgatggtaagatcttcagctatgaaatccggagtgccatgaagatccgcacccgtgagacaggatatgatgcactccagtcaaaagaacagatactttagtagaaaaaagttccagaatgtcggaagattctggaactttctttcgttttaaaattgaagtgttacttctgtctctgtcaatgccaccgtcatctgctctcttatgcacttgggacacagcagttctccgtcagcatctgctgtccgtgcggctctctcacacacattgtcaacacctgtcacctgtttcacaaaccgtgatgtggctgatacctctgtaatcttctctaactgttctgccggataagttgcaaacggtactttatatttctgcgcataggccaaaatcgcaggttcttctttcttaagatcgatcgatgcaagctgttttaactgcgtaggttcaagtccatacccttccagaacatcgtttagacccttttcaaaaagttcttttgaaatctgttttctacagcctactcctgccgtgatattgattggatacaaaaggagaatgcatggcttacgctcacatccacatacgttattcctgacatctccccacagagaacccgctagggattccacgaactgtctcccttcttctgcggtctttgtgatcacgatcacaggatgttcctctgcaaaggagtacaattcttcctgtgaaccacatagtataagttcttttaaacagcttttctgaaaatcttcctgttcaaataccagtccttcaccgatccacagaccgacctgctttccatccagcactgcggctgatatctgcttcgctgcttcgcgctctgtaaaatgcaggtgattcttctttgcaaaaacatctactgcaaattttccctgaacatctgtcgctgttgtctgtaccggaactgcgccggtccatactgcaagctgattggaaagttccaccgcacccccgagatgtcctgacagcagtgggatcacataccctgctttttcatccatgactacaaccgctgaatcagtgaatttatcctttacataaggcgcaatatatctcactgcgattccaactgcaccaataaaaaggaaggatgtctctccccatccttccctgatcagctcttttggattgtccggaaacggaagaatgtcagcgaatgcatatccggcaggtgcatagttctgacacgtaatcccttcgttccggaactgacttccaattctctcaccaagtcttgttcctgcctgtgtaaaacttaatataacaaccttcacgttccattctcccttaaatccttgaaactattcttctgtctcttctttcacagactcttctactgcatccactgcttcttctgcggcctcagtaaccgcctcaactgctgcttcagcagcctctgcaacgctctcttctgcttcctctgcctcttctcttacttcctgagccagatcatcagcttcaaaaatatcttcttcctctgctacaggtgatccgcagtatgggcagaaagccatatctttcgcaaccatcttaccacaccgtgtacactcacacgcacctttgagcccttcaatcttattctcatactcttccatgctttccttgcggcttgcaattgcctcgcacagtcccttggaagcctcatccagttcttctccattctcaaatctgtcataaatactctgaccaagttccatcagatcttctgcatttcctcttgcaagctctctgatctgtgcttttaatttctgtatctcaatcgcgtctcctgcctttgctgtcactgcctctgctgtctcgctcagacgttttcctaaatcttcaaaaaaatctttcatactgaaatctcccttcttatcattgctgtatcatctcaaccaccagaaaggtgatctacaatttctcttggtcttattatatcgtattcttccagtttttgaagtcattttctattatttttagactaatttcataaatagaatccttcttgcatatcctttctacaactcaactcaggagtcatcttatgaatgatcttgaaacttgcagggaacagatactctccgaagatacacgcgacttcatcagtaatccgctgcgcactccactgttcaatgaacttctgaaaaaagatccatgtatccaggatgccgggcttggatatcagtgcatttatttttccaaagaacttgtagagccaatctctctggcgcgtttttcttacaattccattccgaattgttttgctcctgtcgctatggaaacattgaaccagaccggcatccttcctgtgcagaactatccggcacttcaattaaaaggaaaaggcgttctgattggatttcttgacagcggaattgactatcaaaacaaagttttccgcaatctggacggtaccacgcgaattgcggcactttgggatcaaactattcaaaacggaactccacccagagacttcttctacggaagtgaataccgtaaggaagagattgatctggcactttcttctgattccccactgtcacaggtcccttctgtcgatatcgacggacatggaacttatattgccagtctcgctgccggaaatgctgacgctgacgaacagtttctgggagccgctccggaatctactctcgctgttgtcaaattaaaacaagcgaagcaatacctgcgggattattactgcatcacggaaacagccgtctgctatcaggaaacagatctgatccttggattaaaatatctgaatgatctggcagatgaactggggcttccacttgtcatgtgtatcactgtaggctctaatcttggcggtcatgtaggcacgcttccgcttcccgcattacttggcagctacagtctgatgcccgaccggattgctgtggtcggcacgggaaatgaagcagacaaacgtcatcattatttcaatacgatccagtcagaaaatgaccgtaaaactgtagagatccgggttggtgaaaatgtatctggtttcactttggaactttgggtgctgatccccaatctcttctcaatttcaattatttcaccgtccggggaaaatacatccaaaattccatttcatgtaggcacaagtgcagacattgattttctctttgaaaaaacccgcgtctctgttgactaccggcttctggtcgaaaaagcaaactctgaactcatcttcttccgtttccgtaccccggcagaaggcatctggaaaatcatcgtagaaccgacccgcctgattaatggtgatttccatatctggcttcctgtcacagaatttttagacggagaagtctatttcctagaatcagatccttacacgactcttacaaacccggccaatgcccctagtcctctgacggtctcctattacgacggcagcaatggtgcagtcgcccaggcatccggacgcggctatacaagaacaagctttaagaatccttccatcactgctcccgggattaatatcaaaggagctcttccaggagaccgttttgccgtgcgcagcggctcctgcgccgcaaccgctatcaccgccggggcagtcgcacttatgttagaatggcagctctatgaacgcaaaatgcccggcatcgacgtattccagatcaaaagccttcttgttcttggagccatccgaccagacagtatggaataccctaaccgtgaatggggatacggacaattaaacctctataacacatttgaggtcatgagacagctttaactgtcccatgacctcaaagtttctacaatatcttttatcgattcttttctcttttgttctatctgttatcttctcgattctcatagtagcttgtaaccttcttagcatcttctacctgtgttgacggtcctgttccaggagcgaacactactttcagaagaatcggtgtgatgactgttgtaataacaaccactacgataaccggtcctaagatggaagaactcataagtccgagtgcggaacctttacttgctacgatcaaggcaacctcaccacgggagatcattcccactccgattcgtttcgcctgataattcttgtaaccacaaatctttgcaccaagtccacagccgactatcttagtaagaactgccacaactgtaagagcaactgcgaacataatgatggatactgacatctgtggaaggtttaccttcagaccgatacttgcgaaaaataccggtgacagaagcaggtaagacaacgtatcaaacttagactccagataagtagatctctgtacgttggaaataattaatcctgcgatatatgcacctgtaatatctgcaacaccgaaaacttcttctgcgataaatgccataatcaggcagaatacaaatgcaataatcgtatgacgatgcagttccttctcagctccgtcaacccatttcttatacatcttatagaaaacaaatcctacaacacctgaaaatacgaagaatcccacgattttaatcagaaccattccaatctttacagaatcatctgcaagacttgtaacgattgtcaatgcgataataccgagaacatcatcaatgatcgcagcaccaaggattgcatttcctgaacggctcttcaatgctcctaattctttcaatgtctctactgtaatacttacagacgttgctgtgagtacaactccaataaagacattctgaagaactacaggggatgacaggttacttcctgccatgcttggacggttaaagaaccaggcaacaccataacctccgatcagtggaacgatcacaccacaaagagcaataataaaagaagcttttccacttgctttcagctctttgatatccgtctccatacctgcagtaaacatcagaacaataactccgatttctgcaacttcatggataaatgaagtctctgacagaattccaaatcctgccggtccgaggatcaatcccgccagaagtgcgccaacaacctgcggcatctgtactcgtcttgttaacagtccaagtaattttgtagatataagaataattgctaaatccagtaagtatctgtatgtgtccatttttttctcttcctttttgtgatttttttaaactaattccccaatcagttttcagatttttgaacaaaacttctctttctaaaatctcactttatccatctaatctcggtactgcctggcctctcaactgaataaccggtccgccggtaccttctatataagctcttgtaattgttacttctccaatattatcatctttcggaatctcatacataatatccagcataaattcctcaatgatcgcacgcagtgctctggctccggtatctttttccattgccttttctgcaattgcttctaatgcgctgtcatcaaactcaagcttcacttcatctaatgccagcagcttctgatactgttttaaaattgcatttttcggctcttttaagatcttgacaagcatctctttgtcgagtccctttaatgtaaatacaatcggaagacgtcctaagaactccgggatcataccgaattttcttaagtcctcaattgtcaccttagagagcagctcttcatcatgctcgactgtatctttcagttctgcattgaatcccatcgacgttttcttctgcagacgctctttgataatgtcttcaagatccgggaatgcacctccacagataaacagaatattttttgtattcactgttgtcagtggaaccattgcattcttgctgttcgcgcctaccggaacttcaacttcacttccctctaagagtttgagcattccctgctgcacagattcaccactcacatctctctgactggaagtttttttcttggcaatcttatcgatctcatcgataaaaataattccctgttccgcacgctcaacatcattgtctgctgctgcaagaagcttggaaacaacactttcgatgtcatcaccgatatatcctgcctctgtaagagatgttgcatctgtgatcgccagcggcacatctaaaagcttcgccagtgtcttaaccagatatgttttaccacatcctgtaggcccaatcatgagcatatttgatttctctatctcaatctcatccattgttccggttgccacacgtttataatgattatataccgctacagagattgctttctttgcatactcctgtccgacaatatattcatccagacgggctttgatcttatgaggcgccggaatctttttaatatccaactgtttaaactctttcggttttttcttcttctgtttgatcttctgtgcctttggctgcagattatcaagatccgaaaggttcaaaaactgtacgcccggaatgttcatcatcttgctcagatccatcgaactattgttcatcatatcaaagcttctctgcatacaatccggacatactgcgatattattcggaagctcaaccatcttcccagtcacactctccgggcgatgacaaataaaacatattctctcatatccgtcatcatctttttcagaatggtcagaagttgtcacttcttttttttcttcttccctgccagtgtcctgtctgttgtcttccttgtttgtctcttcttcatctacaatgataaaatcattttctgacataggttgtccctttctatcgtatgaacatcgcatccccaaaactgaagaaacgatatctttcttttactgcctcctcatacgctgccatcacatgctcttttccggctaatgcagaaacaagcatgatcagtgtagattccggcagatggaagttcgtgatcaacgcatccagaatcttgaactgatatcccggatagataaagatttctgtccaaccactgcattcttttaatcttccattctcatcggcagcggattcgattgttctgcagcttgttgttccgacacagatgacacgatgtcctgcttcttttgcatggttgatcttctgtgcagactcttctgtaatcatataaaattctgaatgcatatggtgatgctccacatcatctaccttcaccggacggaacgttccaagtccgacatgaagtgtaaccggtgcgatctccacacctttcgcgcgaatctcttccaaaagctccggtgtgaaatgaagtccggccgtcggtgctgccgcagaacctgagtgtaccgcatagacagtattatatctgtccttatcctgaagctgatgtgtaatatacggtggaagcggcatctgtcctaactggtccagaatctcctcgaagattccttcgtattcaaaatggatcagacgatttccttcctccactacatccataacttctccgacaagcagaccgtctccaaagctgattcttgctcccggtcttgccttttttccaggctttaccaatgtctcccagacatcatctgctcctcgttttaaaagaagcacttctatctttgctccggtgtcttcctttgctccgatcagtctggccggaattactttcgtatcattgataaccagacaatctcctggattcagttcatcgataatctcacgaaatacatgatgctctgtcttccctgtctctttatcaagtatcataaggcgggaggaagagcggtcctccaaaggatcctgtgcgatcagttcctccggaagatcataataaaaatcacttgttttcaatgctcttaccctctcttcttactttctcaactcaataccaagttcttccagaccggaaagaatgcgatccattgctgctgtaatttcagcttcttccagtgtcttatcctttgcacggaatacgatagaataagcaactgacttgaatcctgctttgatctgagcaccttcatagatgtcaaacaggttaaagctctctaaatgagcgccgccctttttctcaatcacatcttcaatctgtccgacaaggatttctttcggaacaaccatactgatatctcttgtcactgcaggatatttagcaattcctgtgtactttctgtcaaatgtagcatatggaataatctccggcatatccagaactgcaacatatgcgcgctcaccgattccatagatatcagcaacttccggatgaacttctccaagatatccaactacttttccatcataaatgatgtttgcctggcgtcccgggtgaaggaatgactttcctgcattcggatcgtatttctctctgcccttcataccgattttctcaaagaactcttccactacacctttcatgttgaagaaatctccatctccatacattccaagtgtaaactgcattctctcatccggaagctctgtcagtggaagctcctgcggaatgtaaatatttcccatctcatacagacggacattcttatttcttctgttatagtttgttgcaagagaagtcagcataccatttaaggatgttgtacgcatgatactatagtcttctccaagcggattcatgattgagattgcattgcgaagctttgaatcctctggaagaagaagtttatcaaataccttcgggctctcgaaggaataagacattccctgactgaatccacagaactcagcaatatcacttgcaacctgctcaatacgaagcttgaacggaagcttacctgttgtagcctctccagacggaagtgttgtcgggatattgtcatatccgaaaaatcttgcaacttcctctgcaaggtcagctaatctgaacagatcgtgacggaatgtcggtgcgatcacttcttttgtctctgcatcgtaatcaagatcgattttcttgaaatatccaagcatatcttcctcagaaatatttgttccgagcatgcggttgatcttctctgcatcaaatggaacacgtacaggctctttcttcttgctgtatacgtcaattgctcctccgacaacttcacctgctccaagctcttctacaagctggcaggcacggttcagtgcatccattgcattgttcggatcaagtcccttctcaaacttaccggaagcatctgtacgaagtccgacacgcttactggacttacggatattcaccccgtcaaaacaagctgcctcaaaaagcattgtcttcacgttatctgtaatcatggaattctctcctcccatgattccggcgattccaacagctttttctccgtcacagatcatcagaacatctttgtccattgttctttcctgtccatccagtgtaacgaacttctctccatcctgtgcattcttaactacgatctgatgtcctgcaagtgtatcaagatcataagcatgcattggctgtccgtactcttccattacatagtttgtaatatcaaccaggttgttgattggacggattccaacagatgacagtctgcgctgtaaccactttggtgatggtccgatcttaatattcttaaccgctcttgcgcagtatctggaacacagatctgtattctctacagtcacctttacatagtcattgacatcctcatcatttcctgtctctgttacaaccggtggtttaaactctttattaaatgtagcagctgcttcacgtgcgatacctactacactgtagcagtctacacggtttgatgtgatctcatattcaaaaacaacatcatgaagaccaagaagttctatcgcatctgctccaacctctgtgtcctccgggaaaatgtaaataccattctccggctgttccggatacatctcctttgtagaaccaagttcttcgatagaacacatcattccgtaacttggaactccacggagttttcctttcttgatcttaattccaccggcaactctctgtcccggctcatgtccgcctgcaacgcgtccaccgtctaatacaacaggaactttcgctccctcgaacacattttttgcacctgttacgatctgtataacctctgtaccgatattcacctggcaaactaccagcttgtccgcatccgggtgtttctcaattttctcaatctgacccacaacgatcttgtcaaggtctgcatccagctcctcgaatccttcaacctttgttcctgtcagagtcattgcatctgtatattcctgcgctgtcacgtcaagatccgggacatacgctttgatccatgataatgaagtatccattttatatctccttttttagtttaatttcatcaaaggggcggctctaaaatccaacggctctgcgccgttgccgcgccgcattcgcgccgcttgaagattttatcgcgctcgttagaactgtttcaggaatctgatgtcgttctcgtataataaacgcatatcgtcgatctcatatttcagaagagcgatacgctccagtcctacaccgaatgcaaatccgttgtactcttccggatcaattccgcacatctcgagaacatgtggatgaaccataccacatccaagaatctcgatccagcctgatcctttacagaaacgacatcccttgccgccacacttaaagcagcttacatcaacctcagcacttggctctgtaaatgggaaatgatgtggacggaattttgtctttgtgtccggtccaaacagctcttttgcgaatacttcaagtgttcctttcaggtcagcgaaggaaatgttcttgtcgatcacaagaccctcgatctgatggaaggatggtgaatgtgttgcatctacttcgtcggaacggaatacacgtcccggtgcgatcatacgaatcggaagttttccctgctccatcacacgggcctgtaccggagatgtctgtgtacgaagtacgatatctttattaatatagaaagtatcctgctcatcctttgccggatgatctgccggaatgttcagcttctcaaagttatacagatcatactcaacttccggtccttctacaacttcatatcccatgcctacgaagatacgctctacttcttccagtgcgattgtgttcggatgtctatgtcctacactgttcttcttagatggaagtgtaacatcgattacttctgctttcagcttctcttcacgaatcgctttctccattcttgtcttagattcctctaagagttcctcaattgctgctcttgtatcattcacaagctgtccaaccttcggacgttcctccggtgcaacatctttcattccttttaatacggctgtcagttcaccttttttaccaagaaactttacacgcacgtcattgagtttctccggaacgtcagcctcctgaattcttgcgactgcttccgctttaatctgttccagtctttctttcatcgttttctcctttcttaactcacttatcagggacgaacgttttcataaagaaagacctcatcccaaaagggacgaggtctgaatcactcgcggtaccaccctgattcctgcattctgatctacaggcactctaagttgtgtaacgtacaacatacgacattctctacttttcacatccgaacatatccgttctcctgactgtcccttagatgcttcctttcaaaaatgcagctcacgtgtgaatttcaatcgctatctgaacttaagagaactttcagccgatgattctctctctctgcaagaaaacaggtctctactgtgcacgatcttcgcttttcaaatctaataaacttttcatattctaagtgaatttaccagtctattttaacacagcatttctttttgtcaagtctaaatgaactcctattatagtgtacaatttttgtttgataaaaagaaaattgccaaaagcatctgtttagacacttctggcaattatgtattatcttaattcaaatcaagacaattcttattatctacgtgtaaatctctttctgaaaataacagtaacaattgcagcaccacaaatagccattacaaaaacattcattgcgatattagctgtatctcctgtcttaggagcttctgtctttgttgttttcttatctgctgtatctactttcttgtttgtattgtcatttgttttgttattatccttttctacagctggttttaccggagttggatttacaggtgtagtttgatctggagtcggctttggatctggagttggagtcggctctggatttggagctggttctggatctggagtcggagtcggctctggatctggagttggagtcggctctggatctggagttggctccggatctggagttggttctggatctggagttggttctggatctacagccggaatcttttctacgatcataatgcgtacacgcagtgtgccataagctactttaatctttgtcatctgtggtacacatgatacgagctgatatccttctggcagctggaaatctgttccaagttcaaatgtctttaatacaccctcgccttctgcagctgattcttttactgttgtgcttccaacatactcaccttttactgttgcaaatgtcacattcaaaacggcctctgctgtttctgccggaatagactctacatccattgtatgttcagatgtcactccaagcggtacgtcaacatttgtcgtctgatcctcacttgtttcagcagcaaaaacattcagcgaattaaccagtaacatcgctaatgtaaggcttgaaataaggagttttctcatcctctttttcataacaaatctttccttcctttcttaattatgagtataagtctcttttgtatgacttctacccccccttcttataaattatcgcaaaaaccattttaattataaaaaacaatttttactatttcaaaaatctttcgatataatatatagagacactcatcacatcaaaagacttctgacttccatcttgtatctgagaggctataccgctaataacatcaattctgtctattatctacccaatctttacattgcggcatattcatacacttgtagtatacgccttaagtattcttctgtcaattatttgtgtactttttgtgtttttcttattttctgcttttaaccccttctaaaattgcattgatttctcccccaagcagaataatatacatacacgtatataaccacaacataacaagaatgatcgttgtaaaactaccatacatattagtgaatcctttaaaaatatccaaatagatggaaaagataaaggaaagtgccatccacccgcaggcagtaaagaaagctcccggcagctgtttccgaagtgtagtcttccctgctgctccacggttcggaaggaacttatataccaaatcccagaaaaatgtcaacaacggaagcgtaaaataaatacgcaaccgaacaaccttgtgaatcaccttgcttaaaaatggtgcatgttcataaacgatcacactgatactgttgccgaatacggaaagtaccagtgaaagcatgattgccacaaggaacaaaaatgtataaaggcatgctcttgcacgcagataaaaataatttcttgtctctgtattttcataaatgcagttcaatccataggttactgaaagtacaccctttccagctgaccacaatgcaactaaaatcgtcacagggatgattgaactagatgtcatatatacctgattcacaatactttcaatcatcgggctgactgtggatggaaataccggaagtacagcctccatcacatccgctttcgtcactggtgtaaattgtaccattgttaaaagcaacataaagataggaatcaatgaaagcacaaagaaatatgccgcctgtgctgcgaaagctcccgtgtgatgcgaactcacggtagctgcaattcgcaatccgcgctcttttatcttattaaacttctccattttctttaactccccaggttaaatactcagaacggcttatgtttcttctcagccgccacgaaattgttacttcatggataataccataactattctcaatattcaagcaaaaaagaaagacagccgaatctcttcagctgtcccttaactttatcttttgtctaatccccaaaatgccgttccctgtattttgagtcctagccacggctaggtgggcaacctcatactgcttttctgccgtccactgcaaaaacggaggcctggcatattactcagtcttatcggaatccctttttaaataatgtaggttcaaaatatcagggttctcgcacatttcaggtttttcttctttcttaacctattgctattatactctatccacatcatttttacaactgtaaatatgtggattttgcaattctgtcagcaaaaagaaacggaactgacatttttaataatatctgtttctgagatttcttgtataaacaccgaaccagatcaatacaataaggaaaataatcattgcaactgtatctactattgtcattgtatgaacataacagtgaatcacatcgatcactccatagatcacagataccagtccaaagacaaaaagtgccggagctgtttttgctatataagcctctttatccttacattttttataagtataatcttttcccaggagaattgatgcattgatctcgccctttactttcattataacaaaggaatacaatgcgtaaattccacaacatagaacaaaaatacctataaatccccacatgctgttatccattttttacaccccaagaatattttttactgtctctttcatctgatctgcatcacactctgttgtatgacgaacctctgcatcacggatttctttgatcgcatttggaatcgggaagccagatactttttcaagctcatcaatcagtgcaaagtcttccatctcatcatacttcggatcaattgctgtcataacgttgcgtacgaacttgtacggacttgctgtggaagcaaccagacatttcttctcgtcctttgtatctttacgatactgtgcacacacatgtgctgcaaccgctgtatgagtatccatcacatatcctgtcttctgatatgtgtcatggatcgtctctttcacttcttcttctgtcgcaaatcctccgacaaagtctttcagaccttccttcatctcagctgtgatctcatacacacctttttctttcagctgtgtcatgagctctacatccttctgtgcatcctgtcctgcgattgtgtagatcagacgctccagattgctggagatcagaatgtccatggacggtgaagatgtcaggatgaactctctgtttctgtcatagacacctgtctggaagaaatcaaagagaaccttgttatcattagaagcacagatcagttttgcgatcggcacgcccatctgttttgcataatatgcagcaaggatatttccaaagtttcctgtcggaactgtaacattgatctcctcgcctgcctggatctcttcattctcaagcagctttgcataagcatatacataataaacaacctgcggtacaagacgtccgatattgatggagtttgctgatgagaactgatatcccttcgcatctaattctgctgccagctctttgtcttcaaagattgccttcacaccgctctgtgcgttatcaaagttaccgtggattgctacaacagaagtattctctcccttctgtgtcaccatctgtaattcctgaacgtggcttacgcctccctttggatagaacacgatgatctttgttcccggaacatctgcaaaacctgcaagtgcagccttacctgtatctccggaagttgctgtcaggatcacgatatcatttttcacctggttctttcttgcggaagtgatcatcagatgcggcaggatagaaagtgccatatctttaaatgcgatcgttgctccgtggaacagttccagatgataagtatctcccaccttcacaagtggtgcgatcacttctgtatcaaactttgaatcataagcactgttgatgcagtgtttcagttcttcttctgtaaaatctgtaaagaactgtttcataactgcataagctgtctcctgatatgacatgtctttaagttcatccattgtcacatccagtttcggaacggatacaggaacaaacagtcctccatcatcagccagtccctttaagatggcctgtgaagctgtaacagtcttgtctgaatttctggtgcttttgtataatagattcatccttacatccctcttttatcttgatttcttacttttagtttccagtgaaaatcactcttgtctgcaagtataacacaacttttcttataccacaagaaaatatattatttttgcttttttaagttaccactttactttactgtagttttttactctgtggccggaagatgattgccaaaactccgcatactcccataagaagcggataatacagattcggaataatctgaagcggtgtcaatccggtcagtgttgctgctgacagaagctgtgctccgtatggaatgataccctggcctacagatgtaaacatatccagaagtgaggctgatcttctcggatctacatcaaactcttcactgatttcttttgcgattggacctgtcataacaatggcaaccgtattatttgctgtacatgcatcaacaaaaagggcaagaagtgcgattccgaattctgctcctcttcttccattgatcttgctcttgatcagattcagaatgaactggattccaccatgctctttcacaagtgatacgatacatgctacaatgatagaaataactgtgatgtcatacattgatgtcacaccatttccaacaacctggaacatttcagaaagtgcaatatgtcccatgcttacacctacgatcagggagatcacaattccgctgatcaaaacaacaaatacattgattccgataagtgctccaagaagaacaaccatatacggaagaacttcccaaaggctgtaacttaagttttcctccaaatggaaattcatatttcttgttgcaaaccagaagatcaatactgtaataatcgctgccggaagaacgatgaaaaagtttgccttaaacttgtctttcatttcacatccctgtgtcttaactgctgcaattgttgtatcagagatcatagaaaggttatctccaaacatagctccacacacaactgctccgatgcaaatactaagtgcaaatcctgtcttttcactgattccaactgcgatcggtgcaagtgctgcaatcgttcccatggaagttcccatagaaaccgaaataaaacatccgatcagaaacagacctgcaactgcaaaatgtgccgggatcaatgacaatcctaaattgactgtactgtctactccgcctgctgcagtaactgcacctgaaaaacctccggcacagagaaagatcaggctcatcgtaatgatgttttcctcaccaacacctttggcaatcacttcaatcttcttgttaaaactcaattctttattctgcaaaaatgcaacaaacaatgcgatcaaaaacgcaacgatcgccggcatcgcataaaaatctttgaacacaattcccgcaccgagaaaaatgatcaaaaacactcctattggaagtagtgcaatcgctcttccttttttctccttctccataaaatcctcctgctcataccatttttatttttatccccattttctttcatcggactggcagctgccttcccgacttgtatacgtataaaaggcagtgactatttttgtactgccactgccttttctattttcttattttgctgcaatatatccttttgctgtcaatgcctctgcacagagaactgctccacctgctgcacctcttactgtgttatgggacagtccgataaacttgtaatcgaacattgtatcttctctcagacgtccgatagatacacccattccacgctcgtagttcacatcctctgttacctgtggacggttgtcctcttcaagatactggataaactgcttcggagcactcggaagttctgcttcctgtgggaatcccttgaatgctacaagcttctcgatcagctgctcttttgtaggcttcttctcaaagttgatgaatactgctgctgtatgtccgttcagaaccggtacgcgcacgcactggcatgtgatcttcggaagctctgctttcacgatctgtccgttctctactttaccaagtacacgaagcggctcctgctcgctcttctcttcttctccaccaatgaatgggataatatttccaaccatttccggccagtctttgaatgtcttacctgctccggagattgcctggtatgttgtaacaaccagttcttttggtccgaactctttccatgctgcaaggcaaggtgcatagctctggattgagcagtttggttttactgcaatgaatccgcgtgttgttccaagacgtttcttctgatctttgatcacttcaaaatgatctgcattgatctccggtactaccattggtacatccggtgtccagcggtgtgcactgttgttagatacaaccgctgtctctgtcttcgcatatgcttcttcaattgctttgatctcgtctttagacatatccactgcactgaatacaaaatcaactgtagatgctacatgctctacatcatttacattcaggactaccagcttcttaactgcttccggcatcggtgtatccattttccaacggtcacctactgcttcttcatatgtcttacctgcggaacgcgggcttgctgctactgttacaacttcaaaccatggatggttctcaagcagggaaataaatctctgtcctaccatacctgttgctccaaggatacctacttttaatttctgctccattgttttcttctcccttttcttcttattttctattttctatccaaacgttctctttcaattcccattatataatgaaagaaaaccttcagttatttttgctcgctgtgattatccattactctgtcacaagataagcttcttcgattgcgatcactttctccattgccgcttttcccggtgcaccgatcgtatttctcatctctacacaggtcttcatgctgatcgcatcataaatatcttcttcaaacaccggtgagatggctttgaattcttccattgtcatatcatccagtgctttcttatgctcaatgcagtacagtacgagttgtccaacgattccatgtgcatcacggaacggaactccatgattcaccagataatctgctgcatctgtcgcattggtaaatccatgcttcgcactctcttccatgcgtgcatcgttaaacttcattgtcttaagcattcctgtaaagagtgccagacatccttttgttgtatcaattgcatcgaatacaagttctttgtcttcctgcatgtctttgttataagcaagcggaattcccttcattgttgtcagaagagaagtcaatgctccgtaaactcttcctgtcttaccacgtacaagttctgcaatatccgggttcttcttctgtggcatgatactgcttcctgtactgtaagcgtcatcaatatccacaaactgatattcgttagaattccagatgatcacttcctctgagaatctgctcagatgcatcatcacagttgacatcgctgacaaaagctcgatcagataatctctgtcagatacagaatccatactgttcagtgtcggtcctgcaaaatccagaagctctgccgtgtactctctgtcaagcggataagttgttccggcaagtgctccagctcccagcgggcagtaattcattctcttataaatgtctttcattctggatctgtcacgcttgaacatctcgaaataagctcccatatgatgtgcaagagtgatcggctgtgctttctgaagatgtgtaaatcccggcatgtaagtttcgacattctctttcatcagtttcagaagaacttccagaatctctttcaagagtccgtcaagctcaataatctcatctcttgtataaagtctcatatccagtgcaacctggtcgtttctgcttcttcctgtatgcagcttctttcctgcatccccgatccggtcgatcaggtttgcctcaacaaagctgtgaatatcttcatatttatctgtaatctcaagtgttccgttttccacatcctcacggattccgttcagtccgtcaatgatctgcttcttctcatcctcagtcagaattccctgctttgcaagcattgtcacatgtgcaatacttcctcggatatcctgctcatagaatctcttgtcgaaagagatggatgcgttaaaattataaaccagctgatctgtctcttttgtaaaacgaccgccccataactgtgccatctgtctttccccttttctattatatcgtatttgcccattagtttatcacactaaagtgtcaaatgtctactacaaacttgcaaaatatacctgatttcgacgaattctgtagattttttcttattttctgctattttaatcacttcttccgtcatttcacacacatttttctgcctgacgtgctttataggagaactcacatccacaataatcctgacggtaaagaccatagattccagacaattcgatggatctcttatatccattcttcttcttgaaatcagaaagcagatactgtacaccatattcttcaccgacacgttgtccgatctcattcaacttctgcgcattcttcatcggacttatgctgagtgttgttgtaaaatagtcgaatcctccggccactgcaatttctgcggattccttcagacgaagttcatagcatcccatgcatctggaaccgccctctctcacttcttccagtccttttgccatctcatagaaccggtcgcggtcatatttaccggctaaaaatgataccggataccggaaatgcatctcttcaatcaatttctgttgttccaggatacgctttgtgtattcactttctggataaatattgggattataatagaagacagtgattttaaaatactgtgataaatactctaatacataactactgcacggtgcgcagcaactatgtagtaaaagagttggtactttttcttccttttccagtcttgtcagaagcttctctagttctttctgatagtttattttctgtaagttcattttcatcattctcctgtatctttgttccagatcaatcattccttttttctaaaacgcctgacatgttcattgattcactctcaggattatttttacatatcataacattaactactactgaaatggagtcttcaatgaattctcttctggaacttcataacatatattattcttatcacacattggacgcagaaacaagggctttatctgatctttccttttccgtgcaacctggaaccttcacagcagttgtcggtccttccggatgtggcaaatctacacttctctccctgatctgtggattgatgaagccagatgcaggagaaatcctgttaaatggtatccctctcaaggaaaattcccccctgattggctatatgctccaacacgatcatttactggactggcgcagtatttaccggaatgtcaccctcggtccggaaatctgcggcacactgaatactgcaaccaaaaaacgtgcgtatgagcttctcgaacaatatggtttaaaacaatttgcttctgcacgtccctcccagctttccggaggaatgcgccagcgtgccgccctgattcggactctgctgcctgatccgcaactcttactgcttgatgagcccttttccgctctggattatcagaccagactgaccgtcagcgacgacatcggtcagattatccgacagagtggaaagaccgcacttcttgtcactcatgatctatcggaagcaatcagcctttccgaccgggtcattgtcctcaccaaccgtcctgccaacgtccgttgcgaaattccgattttctttaaattagaacaagacacacctttaaatcggcggaatgcacctgaattcaaacactactttaatcaaatctggaaggagctaaaccatgacaactgagcatcttcgttttctcaaaaaaatccgcagacgccgacggatggtcgtttttctgcggattctgattcttttcttattcctgttacaatgggaaatctgtgccgataccggagttgttgattcctttatcttcagcagcccttcccgtatcgtaacctgttttctgaaaatgacagaggatggttctgtctttcaccatattggaatcaccttgtatgagacacttgtcagctttcttctggtcacacttaccagcattctgattgcaatcctcctctggtgtttccatggactctccgaaattcttgacccttacatggttgtcctgaatagcctgccaaaatctgccctggcgcccttacttattgtctggctgggtgccaataccacaaccattgttgttgccggaatgtccgttgcaattttcggaagtatcctgaacctctacaccagtttttctacgatcgaccaggaaaaaattcgtctgatctacacactacatggaaaacgcaggcatgcgctgaccaaggtggttcttcctggttccattccggcaatcatcagtaatatgaaagtcaatattggactttgtcttgtcggagttatcatcggtgaatttctagccgcaagaagcggacttggatacctgatcatctattccagccaggtatttaaacttgactggcttctgatgagtatctgcattctatgtatcattgcagtgctgttgtatgcgataatcggtctgatagaaaaatggtatctgaaaaagacggggtgacagtattgatctgtcatcccgcctttttcataattcaaaacttcctgtcggtccggtaacaagaatctgcaaatgctgtatcactgtacttcttttattatcttccgaatcaccctgacatcttcttctaattcatccgcgatctgctcaagtgatttttgcttctgcagctttctctttactttttcctttaacagatcatcccttccctgctggattccttgctgcattccatctcttacgccatcgtcatacatttcctgaattgcttcacacatattgattgcctcctccttattctcggtttcacctggtatatgtttcatgtttaaaaatgccttcatcgcctgacttgtctcatggtcaaccttttgaaagaattgcttattttcattaacatagtttcttaatccatccttatcttttctatattttagcatagttaatatcacttgtaaatcctcagagaacctctctgtttcctctaagcgttctgcatctaccagattaatccgataatttggaagatatttttcaagaattgctttttctttttccgttccttctaatcgaaacatgtcatataagtccaccggcccgtcccacggttctgatccataataaaatacgagcgaaataatcggcgttaatcggtctgttcttcgaaaacgagataagtattctccagctgtaagatgttctaacgtctgtcctgtttttttagcctgcctttggccttctgtaaaacattcccagttatttcgaatctgtgtttcataatccattccgtcataaagcatcactttatgtggcatagcataatgaatcttatcttgcgcttcattcgcaagaagtacaagcgtcgcctggctcttccatcgcataataatgtcccggtatttcttcatacttttcgtttttcctactctgtttttcacattaacagatgagactggatttacctcttctaaatcttcaggcaatatcacatcctctccaccataaatcacaccattaaataaatttgcgaatcgatttttttcacttagccagatattgacattaacatctgcttttcccatagacagttcctccctgatttttattcttttgtttttaaatcatcaaaaatggaatctcatgctgatatagccttgaaaatgagatattgttatctcttcgataacatgttcagacaaatgaaatatagaaatatatgtctgagattttgatgtggattaactatagcaaaataaactgctactgtcaatgataaaaatcgacctggatccataggaatcaaaacaacaattcaaaaatccaggccattccctacttatttattttttagaaacattctccctgaaaatgctatgtgtgctctctcataaaactcacactcagccgggcagattgggcgatataatggatccgctacaacaatttgcgcatccttcagtgcctcttccatctcttcttcaccgcatacttttaaatcctgacttccaatcagtccatccgtttcctctaacggacaaagaacctttgttttatagtgatattctttttcaattaaagctgcaagagatgttgttgtaaccggctcaccgatcagagtaattattttttcagaatttccggttccctgtaaattttctttttcccgatcttctaaagcaggaagccggatgcgtttttccaaagcttcactgattctctctgcatattctttatacggtgtcccgatcacataaggcgttccagatttctctttcaatgccctcgccgcccgaagcccgacagatgatacgacaagatttacttctgcatttcctgcattggaaaggtcttctaaagtatctcccatcgcccatgtggaaatgattttccatccatactgttcaagattctttttcaactcttctacttttgaaatcgggccaaaatcaagaggagttattccaagcaggtttactatccgtttgacatagttttctctcgtttctttttctgtaacaaatctttttgcaatttcttcgaatgcgattcctgctccatatacataatcatgcattccatttgtcggcactgcaaaggatggtattcctgtttcaatttccagcactttcgccagtgccggaaaatcggttccattcataaatggaatcggtgaactgacaagtgcgataaatttcggatgaaattcacgtgctgcttctttgatatctgataaaaatttttcgtcatttcccatgaccgcatcaatctccgtcagacctgaaataaaaatcaggctatcctgatcgtaccagcgaatttcatcatgtgtattataggtagaattgcagccggatggatcgtgcatcacgaccatgcctcccaactcataaagtgcagaacagacacctgatacatctgaagtataaatcggtatgattcgatacgattgtctcatatgcagcttgtgcacccccatccttttcttacgatcattgttttcggatcttttttattcaaaaatgcttcttccataagttccgctgtccttcggattccgtcaaatccttgcaggctggctccctgaaccagatttacaaagtaatgacttcctgtagaccacgctgctttctgaccgattgcaagtgtcttttccgaaggatgcgcttcatgcagtacacgcatctttgcatgaactgtcgcacgaagttccagttttggtgcatttactttcagccattcaaatacttctttttcttccggacttatactgtccagaaaaacagtctttacgttaaatccatgtatcagcaaaagcctggccagtccaagtggacgcggatggaaagtataatcaatcgtaattggagcatttccaataatttgttttgcatgatttaacgcttcttcgcaaagtgcgattttcttttccatccattcacttagaatctgctttccttccactcccaaagaattccacaaagtctcttcttcgcttctgatttcttcataatcaaaactaagtggcagataaagaaatgctcttcttaatctttctgccagtgtttcaatcccatactttccagatggataacaacagagaaatgttcccgcatttcccaattcttcatactcttcccatgtgctgcaatcttgcaattctctgactttatatcctgctatagctagcaattcctttaaatcacagcttagatctaacgcaaagtcactccccaatatggaaatctgttttgtatccattttattccgatcaggattcagtggttcatacattgcttttcgaagcttttgatccggtgttggtccatgtttttgcataattggatccatatagcatctcaaaaatctgatttctggaaatcgttgctccagttccctgtaaatccgctccagatcgcatccgagaaaatgatgaaggcatactgtaaacagaagaactgccttcggcattttctgtcccgtcttttcctcgcgttcttttagttttcttaaaatatctgccgttccttcaatcgtcacatcttccagatttccgcttaacaagttctgctcctctacgatcacaaaggaaaatctatcttcttcacacatctctgctgcagtaagcacaacgccccgcatacagttgtccgcacagacataaatctgatgtgcttccggaatcagcattccagtatgaacgatattccaacagccatgtgccggtgaattaaattccagcccttgtgggaacggaattggataggatgcgtcttttatgctgacaaccgcatctttctcactgatcggccaggctgattctccaacttttctaagcatttgacacctcttgtttttctctcactttcatcaggattgctttggcaagtatgcgatattcttctgccatttcactttccggaaatgcttcaagaacggtctttttctgttcttctgcctgctgaacaagatcacttcttgtcaaagttcctacgatacttgtatgaaaatcttctgccagttcttctactttctcctcctcacgcaggacatttcttcgattcaggatcagccctcccagtgtggcatatccgcgattcttaaagttttctaccgccatagcaatattcgcacctgcatgaatcgccatattttctccagatgtaacaataaagatcttgtctgcatacccatttcgcatcggcatagaaaatccaccacagacaacgtctccgagcacatcataaagcactacatccggctggtatttctcatatgcacctgtctcttcgagtttttccagtgcagttatgattccgcgtcctgcgcacccaagtcccggtgtcgggccgcctgcttctacgcagacaattcctttgtatccaattttcacaatatcttccagtttcaggttctgtttcttttcctgatacatctgaagtacggtcggaacttcttccccatgtctgagcaggatcgtagaatccgccttcggatcgcatccaatctgaagaacctttaatccctgctcagccagtgctgctgccacattggagactgtcgtcgactttccgattccaccttttccatatactgcaattttaatcattctgtgcctccgcttttgtaatgatgtttgaataggcagtcttcgctgacacacctttgagtcttccgatctttccggaaaggctgctgatcatatcctgcggtgcatcaattgcaatactgatgatattaattcccttttccctgtatggaatccccatacgcccgataatataatttccggcttcatgaagaagatcattcagtgtaacgatcgcttccggattttccacaattatggagattactgctactcttgtatccatttcgattcctttctccgcattttgttatatcgctctcttccgttcctcatgccacagctcaattccactcacgcttcatttcgctgtatcgctctcttccgttcctcatgctacagctcaattccgctcacgcttcatttcgctgtatggcgttcgccatatggagaaagttgtctcttcttgcttatgcaagctagcttgcagcgcatgaagaaacaactttctccgcatttcggaactggtttaacagatccgtggcaacaactctccacctggctgtgggaggagggactgggttcctatttctgtcatgcgtattaccttgcctgggttttcttctgtgattgttccgatgattgctgcattttgagagtatggacactggtgaagtgtctctacaatcttttctgcctgttctgccggagcaatgatcaccattgttccttcgcaggcaagataaagtggttcaagtccaagcattccacagactccctgcacctcggtagctaccgggatttttgctgcatcgatctgtaccccaacctggctctgtcctgcaatctcgtataatacagttccgacaccgcctcttgtcgcatcacggattacatgaagttcatgtgtcgtgtccataacagcctccaccgtcttccaaagtggggcgcaatcgctcttcacatctgcctcgattccgaaatcttctctcgcaagaaggatcgtgcatccatgtcggccgatatctccggttacgataactgcatctcctggcttcgcaagttctccgccaacctgtacgccatcttcaatttgtcccattccggttgttgtgataaagactccgtctacctgtccttttccggcaaccttggtgtctcctgatacgatgcgaacacctgcttctttcgctgttttagccattgcctccgcaatctgctccagtttctccattgggaatccttcttcaatcacaaatgcacaagtcagatataatggttttgcccccatgcaggccaggtcatttactgttccgcagatagacagttttccaatatttcctcccgggaaaaatgccggagatacgataaatccatctgttgacactgccattttcccaaccggcggatttaatacggctgcatcatctgctgtcagatccggatttgcaaaatgtgctgcaaatactttgtcgatcagttctgaagtctgttttccgcctgctccgtgtgccattgtaactgtctggctttctattttttcgctcatattatttcctctttttccgtcactgttcacagtaaccatttctattttcttctatactccgtacatgaaataagcggaacacgcaccttcatttgaaaccatgcatgctcctaccggatgctgcggtgtacagacttttccaaatactttgcaatctgatggcttacattttccctgtaaaacatctccgcaacgacaagccggatttgctcttccttccatttccggaatctgatatttcactcttgcatcaaacatttcccactctttacgaagcttcattccggaatctggaatcactccaagaccacgccattcactgtcgcaggattccatcagttcatctacaagacgctgtgcctctttgcttccttctgctgttactactcttggatagcagtttacaaaaaatggttttccttcctggtagcgtttcaatgaaacagccaatgctgtcagcagttctttcgcagtaaatcctgctacaactccactgactccctcctttgtcagagattcacacaatgccgttccggtaattgcatttacatgtcccggataaagaaacacatctgcacttccttttaatgcttcataagctcccggcatcgtcttatttgccgtcaggatagaataattctctagttgttcttctttcgctttctttactgataagcaagaagaaggtgttgttgtctcaaaaccaacggacaggaacacgacttgttcctccggatgtaacctcgcatatttttctgcatctgccggtgaataaacaatctggatctttgcgcccttttctctcgctcccgcaagactcatctttgttcccggtacacggacaagatcgccaaaagtacagactgtcacacctgcttgaagtgcaagccacactgcctcatcaataaacccaaccggtgtcacacagaccggacatcccggtcctgagatcagttccacctgctttggaagtaatttgcggattccaaggcgaaagatctcatgtgtatgtgttccgcacacttccataatgcgaaccggtggtccatcatactgctcgatgatttccctcgctgtttttctttgtttctcatttctttcagatgtttgattttttgttatatcctgcatcatcatttattcttttcaccccattgttcactgctctatagcagttcttccataagctgatcggtctcttcgtcatcttcttctgtgatctttgcaattgcgactccggcatgcaccatcacgtaatcgcccggctccagatcttctaataactctgaagatacttcccttttcgcaccacctgcatctaccactgcagttccgtcactgatgcgaaccactttagctgataatcctacacacatttttcttattcctttcttttttaactctataaaatcggagcttcctctacacactcatgattcattccataaaatgcctgaccaagcgcaattcctccgtcattcggcggaatcatctgatgtgtcagcacatgaaaaccatttgcaattaatccgtcttccgtcagacgaagcagtaatccattctgaaatacaccgccactaagcgctgctgtccggcatccggttttctctgcagcatggacacacgctgcaacaatctgctctgcgagtcctttatgaaattcataagctgccttttctattaagtcctgatcaaatgtatcttctgccactgcattttcgccaatattgctaaccacttcgactgctgccctcaccagtcgacttgtcagaagaagttctcttccgtcgtctgctgattcagttaaacacttctgcccgtctaagacatttattttcttctcaccagatcttttttcataagcttctgctgcgaattccaatgccatggaggcttctccttcaaaagaagatttctttcgaattccaagtatcgcactgattccatcaaataatcttcctgcactggttgactctaccgcattgatctttctctcaagcatcgcaagctgaactttcgcttctttttcctcgcaaagaccaagtttctgaataatctgcatcgcctcatcttttgattcagatatttgccagattaaagaaactgcgatacgccatccttcttttgctgataggtcgcctccagcctgtaaaaatggttcaatacttccgattctccggaatccgtcaagatctgccagaagtatttctccaccccatatggttccgtccgttccatagccggttccgtcaaaagatactccgatcacctgttccatccagtcattctctgccatacaggataagatgtgtgcataatgatgctgcactttcaaaacaggaagtcccagttcttccgcaaccaccgtcgaattatatttgggatgcatatcgcagacgacaacgcttggttccacttctaacaatgtttccatccgctgtattgtctctttcaatgcatttaccgttcttaaatcttctaagtcccccacataagccgaaggataaaatctactatccacaccgatacagaatgtatttttcaattctccgccggcagctaatacctgtcctttccattttcctgacgtctggatcggaagtggcgcatatccccttgatctgcgaatcatatatggtctgtttttatagaaatccatcacggaatcatctgctctcacacgaatttttcgattgtgagacaagatgcagtcacaaaattccgaaagctcttcgagtgcttcctcatccgatctgcaaattggcgcaccggatacatttccactggtcattacgagaaagttcggcattttgattccatccggatattgaaatagaagtaactgtaccggcgcatatggaagcatcactcctactttgggattgcccggtgcgacagatgaacacagctgcttcgtttctatctctttcctcaccaaaagaagaatcggcttctgatgtccagtgagaatttcttcctgctccttactcaactcacagacactttgcactacatcaggatttcttgccatcactgcaaacggtttcgccgggcggcgttttctctttcttaagagttccactgcagcctcatttgatgcatcacagcaaagatgaaatcctccgattcccttcactgctacgattccgccttcggaaatcactcttcttgcttccgtaattgcatcagaacctttcatgtctatcgttctatcagaagttttgatcaaataaacttccggtccgcacatattacaacaaaccggctgcgcatcgtatcttctgctttccggattgtaatattctgcctcacattccggacacatcggaaattctttcatactcgtacgctctctgtcatatggaagagcatccagaatcgtaagccgcggaccacaacacgtacaattaataaacggatgtaagtatctgcgatccttgggatcatacaattcttccttacattcctcacagattgcaatatccggagaaataaagatctctccttttgtcttctcgctttctatgatagaaaagtccggatatttttcctttgtatccagtatttcttctgaaactttaagaatcgcggcacgttttggcggacaggtacgaactttctcaataaacagattcactgccgtctcgcttccctgtgcgaagatttcaacataaggtccacgattactgacacttcctctgatcttacaggaatctgcatgtcgactgacggtcggacggaatcctacgccctgtacaattccatagacacggattttcttcgttatctccttctccatagactttttcctcccgttatgactcctgcagttttcctgagactgcaaaatgccgtatattaacaaatgttcctttgaatcccggtaccaggcctctcatattttcatctgcaaagacaatgtcatagttcccattttgaacaagcttacaataatccatctcttctttcagtgaaagatctccttcttctgaaagctcggatttcatcataaaccagcttgccaccgtaacttctgtattctgttcatcacttcttgtacgaatttcctgtctgatggcatttgcaatcacctgctgatgaatgatcagtatctttttcctttcataaccaagttcaggtatcaattcatctacgaatggatatcccacttcatacggtgtgccaaattctttttccagatattttgctgtctcgagtgccgacggtgctacaaccagattcttatctgcagagcctgctgtctttactttatcaatacctgctctcattccatagcaaatataatgcgtattctcattttctgatttccgaaacttctcttctatcttcaggtcactgacatcatgtggcgtcagaccgagaactccgattttcatctttttagaagaatcgtcttcttctgaagcttccttctgtgatgctacatcttttcctgcaaatgtcttgaataaagtcagccatgccttctcttctcccacatcatacagttccattccgttcgtatctacagtcagaatcggaagatttgtcttcttctcgcacattctctgtaatgctctataatccgttgcgatcacagccggaaccggagtaccgatcaccgctgcaaaatttgcatcaatcttctctgctgcatccgtaagtttcgcaacaagcctgtcatctcttccaaggattgcatccatgtcacgcaagcccgcactgaaaatcgcactacgttccccgaaccagcgcggttcatcgaatccgcatacatttcctgtacagcctcccgcatcacaaataacaagaattcctcccagttcatagaaaacggacgctgcacctgactgatccggtgcaaatggagtcagtcctttccaaaggccacgtacataaacgtcttcttttttgtccacttcctctttgaacagtgattcttgactctgctctgcaattgcttcttgtgatttagaaccgatcacttccacctgtttctgcaaaacattaccttctgcctgttctgtcacagccagttccagcgcctcaaacagtcttctcacgcctgcatatccgaaaggctgtctctcctcattccaatggattccttttgtgttcggatgataataacaggcatcctttccgattgtcagtgtcacgccactttccgttggatcataatagagcatcgtcggttccatattggaaaaaatctttatctgcggacttaactttttcaactgtctgatataaataaagttctccccagtaatcgttccgtagatttctgctactttaaatccatatttcaccaatgctaatgataattcaaacggatccgcatttgcacattccccaacagcaaataccgggtccggacagactttacgaaaactttcaattgcttcctgtgcctgttttttctgttcctctgcatgaaattctattccaagtgctgcgccaaatgcctgatactggcttccaattttatcaatctgataaagtctgcgcagttcgataaatggaatctttaatctgtcatgaaaatcctctgctgcaaatcgtgcctccgggtgaagaacaagattaaaatttgcctcagacattttcttatattcttcaaaatcttcacatctcgaaatctcatgaatcgttttcacacctgcctcttgaagcagtgtatataattcacagtcatctacgagtggtgaaaagtatccgagcagatttactacatttccttttttatgtcctggttcaagaagtgaatacagagactgtctcacatgaaccattggtggctttcgtccctctcgtgtcaatgcatacatataacatggacgcaccggaagtccggctttttcttccgcttttctacagacacgttccatatctgttccaagaagggcatccacacaggtaatacagatcatcacaacggatggtttcttatcaagactttcacagattgatgcaactgctttcgggatcttctttagatgacgccctgttacaatatcagtctcatccatgcaaaggtaaaagaaacggttattatattctttcattgaactgatcatggacgtatttcttccacagcaccccggtgccacgatcagcatgatcgatcccggcactgcaagtcctgctcttttcactccgaacccttctgcccctggagagttaaaggcaagcgtagccggcgaactatagattaaatgttccactgactgaaactgtttcggaagattatcctttcctctttgttccagttcttccgctgtacaaaaatatgctttcttcatatattttccctcgacttatattttatctcacacgttctgtttcatcctctaacagcttttctgccagttcaaagaatctcttactgatctcagaatctgcgtcgccttcgatcacagtctttccctgatcttcccagcgtataatctcgtcacttcttggaatctcaccaacaataggaatctttttttcttctgcaaatgcctgtaccttctccgtttcattttccacatttctatgattcaggatcaatccaaaaattcttgcataactgcgatcttcaaagttacgcactgcgctggaaatattgttagccgcatacaatgccatcttttctccggatgtaacaatcacaaccttctctgcatatccttcccggattggtgctgcaaatccgccacagacaacatccccaagcacatcatacagaacaacatccggtttgtatgtctcaaacaatcgcaagtcttctaataactgaaatgtcgctatgatcccgcgtcctgcacatcctagtcccggtgtcggtccgcctgtctcgatacagagcacaccaccgaatccttcctttgcgatctgatctaattcttccggctcctcatcctcttctctcatataattcattaccggacgcaatggctctccgcctaacagattgatcgttgaatctgctttcggatcacatccgatctggattacgcgcttccccatagcggcaaatgctgctgccagattcgatgtaatcgtggactttccaatcccaccttttccgtaaattgctacctttaacatattgctgatcctcccattttatttccctggtaaagagaaagacccttcttccccaacggaaaaagagtctgttaaaatcacaaaatatttttttgtctaaacgcttctttacaactattcccgctcggtatccttacttccttgccgtcagagtctatattctattcaaaatccatgtctttattgctatgagatatctctctgctgcattcagattgaaacgtattctttccgtttggaacagttgtaaatctcttgcaaaaccattagttaaattataacttatcactaatagaatggcaatgaatttctggttattatagcgttttttatttcacaatattgttattgttttatccaacaaatttactccaatatccctgcacaaagataaataatacgatcaatggcagaatataggatacatagaatctggcccagcccgggaacttgattccacttcctgcattcgcttctttctggaacttatcccagccccaaccatagcggcttgtacagaacagaaggtagatcaggcttccgatcggaagcaggttattacttacaataaagtcctcaaggtcctgaatactgcttcctgctcccagaggcatgaagccgctccatatgttgaatccaaaaatacatggaagggaaagtacaatgatcgcgatcagatttcccacaaccgcctttgttcttgaacaatttgttaaatccatcacaaatgcgatcagattttcaaacacggcaatgatcgtagagcatgctgcgaaaaacatgcaaaggaagaaaattgttccccagattctccctgcactcattgcattgaaaatgttcggaagtgtgataaagatcagactcggaccgctgtccggctggacattaaatgcaaagcaggccggaaagataataaatccagcaatcaatgcaactaatgtatccagaactgttacgcagactgcttctcctgtcagagttctttcttttccgatataacttccaaagatcgcaatcgcaccgattccaagacttaatgtaaagaatgcctgtcccatcgctgcgaaaataacttctttcaatcctgcttctgctgctttcttaaaatcaggaagaagatagaactccagtcctttctctgctcccggcaatgtcacggaacgcactgcaagaatgatcatcaacacgaaaagaaggatcatcattttctttgtgatctgctccacacctttctgaagtcccatacagacgattccaaagcacagcacaacaacaaggatcatacagattgtcattgtaacaggctgtccaagaagtgatgtaaatactccggtcacaccatccgcatcaagtcctttaaactctccgattgccatctttcctgtatatagaagaagccatccgccgattgttgtgtagaacatcattaaaagatagtttccaccgattccaaaccatttataccagtgccactttgttcccagtggttccagacggtcaaaggatagtgcaatacttgcctgacttccacgacccactgcgaattccattaccatgattggcaatcccaacagaacaagaaacagtagatagatcagaacaaatgctgctcctccatactttcctgtaatatacggaaaacgccaaacatttcccaagccaatggcacatcccgctgagatcaggataaatcccagacgtgagccaaatttttctcgtttcatttcttagttgtcctctcttccttctttagtgtcataaaatgctgtaactgaacttacaaccattcgataagccatctctgctgcatattccggtgtttccttttcgcctgtttccaaccatgttttcacaaaaccgagacaaccgttcaggcaataagaataaaaatatttcatttcacctgatttctccggtacaagagctgcaagtgactcccgactcttttcctctaaaagctgctctaacttatgtacaaaaccaatatccccatgtggtcctacaagcgcacttgcaatctgacgattttcatcaagcacatgaaataaatcctgaataaaatagtaaacgctatcttttcccggatcaattggatgttcacggattgcgcgctgcatctcttccatcatttcattttcaacttctgcaagcagccccggtatatcagaataatgcagataaaaggtagaacgattgatatccaccgcatctaccaattcttttaccgtaatctctctgatactcttctccctcatcaattgagcaagacctgttttaagctgactttttgtctttctgactctgcgatctgtcttcttctgcatcttctcttcccccctttataacttacagtactactgaccaataactctctactctgtttctatgacttaaatgaatgattttgttactgttcactcccgtgtgaacagtaacatgattttctccacctgctagacatttttcaatctttcgtctattattagacatatccagtgttgattaatggttgtaaattagtttctacattaatataatactttttgacatgaaaatcaacattgtatctattactagaaatatttttaagaaaaggagttttatccatgagaaacgcatttcggatttttcgccgcgatatgaaacgcctgctccgtaatccggcagcaatacttgttttgatcggagtatctattctcccctcactctacgcatggttcaatattgcagcaaatatcgatccttatgccaatacttccggcatcaaggtagcagtagcaaatctggacaccgatgccacacatgatgatctgacgatcaatgccggcagccagattattgaccaactaaaggaaaacgaccaattaggatggacatttgtttccaaagatgctgctattgaaggagtcaaatccggtgaatattatgcagcaatcattattccgcaagattttagcgaatccctgctaagtgtcctgtccggaaagattgaaactccggaacttgaatactatatcaatgaaaaactcaatgcaattgcgccaaagatcaccagttcaggtgcaagcacgatccaaacacaggttaataacaccttttcctctgttgcatctgagacaattgccgagattttaaaggattctgtattcaacatttccgactctgttaattcaacaaatgcagagattaatgatctgcttacaaaagcaaataataatatcaaagaatacgaacagcttctagaaaagttcagtaaagactcatccaatacctcaaagctgatagagaatgcaaaagaagcatctacatctttaggagatgtagcaacatccggagcaaatgcattgtccagtgctgactctgtcatgaatacgacacgttcttctgccggagatttttcttccgcactttctaagtccctctctgacggagaacttttacttggtcaggcaagcagctcaacatccacaggactgacagaacttgctaccgtagccggaaagatcaacacttctgtcagtgatgcgcttggttatgcaaactcagtcaatgaactgaatgcagatattcttaaaaaaatgcaggaacttgccaataagtttccgggaacgatcggagatcagatcaatgcacagatttctgccctgcaaactcagaaccagtcaaatcaggaattgatcaatagtcttcagactggaaataatggaatcaaagatgcgattgatacaacaactgcaacacaggaacagcttacttctctgacaaaagaaagtatcaataacctgcacactttccgttctacatttgaccagaatattcttccactgcttggacagacactggatacattttccacactgaccggtcaggtagaaggaatgctaaacggagtaccggctacttctaagcagatcaatgatatgctcgaccagttagaaagtggattgtcaaatacaactgccctccttgacagtacgaaggaatctttaagtgccgtaagcgacaaactaagtacaattcagacggatctgaatgcactgacaggctctgctacataccaaaaactgctctctcttgaaggcattgatgcagaatctatctcatcatttatgtcctctcctgtggagattaaaacggagacttattatgccgtagataattacggttcttctatgacaccgttctactctaatcttgcaatctgggtcggcggtatcgtactgatcgcaatctttaagctggaagtggacaaagacgaatccatgcgcggttacggacagacaacattatactttggacgctggctcttatacatggcagttggtcttgttcagggatttatcgtctgcctcggtgatacactccttccgggagtccaatgcaatcatccggcacaattcatcctgacaggaatggtttgctctttcgtctatgtaaatattatttatgcgctgtcacttacatttaagcatattggtaaagcgctctgtgttattctcgtaatcctgcagattcctggttcttccggaacctacccgattgagatgacaccagcctttttccagaaactgcatccactccttccatttacatatggtgtgaatgctatgcgtgaagcaatcgccggtttctacggttctaacttccgcaatgatcttctgatcctgctcctgtgctacgtgccgatctctctgcttattggacttggacttcgcccggctctttccggactgaaccatctgttcgacaagaaactggcagagacagaatttatgatgtgcgaacctcacgaagcagaacttagcagaagtacacagctctccatgctcttacaggcatctctttccatcgaagaccttcgccttgtaacagctgaacgggcacaaaaatttgaaaacaattaccataagatgattcgtatcggcttccttgccattgcgatcatccctctgatcttcctgatcctgatgttcagtctcgaatcaaagattgtattcctgactttatggatcatttccattattgcgatctcagtatggttgatcgttgtagaatacattcatacaaaattagaagaacagaaagaacttgccggcatgtcttatgaagaaatgcttgaaaacttccgtggaaaggaggcggaataatttgaaaaatatttttttaatcctgaaaaatgatctgatgaagatccagaaaaatgtcatcgcaatggtcgttattatgggaatcactgtaattccgactctttatgcatggtttaacatttccgcaagctgggatccttacggaaatacaggtgcgctaaaacttgcagttgcaagtgatgacaaagggtatgaaagtgatcttattgccgtaaagatcaacatgggagagcagatcctctcttctctgcataaaaattctcagttcaactgggtttttactgattcaaaagatgctcaaaaaggtgtaaaatccggagaatattatgctgcgatcgtaatccctgaagactttagccagaaaatgatgagtgtcttctcttctgaagctgaacatccggatctgacttattatgaaaatgaaaaagaaaatgcgattgctccgatcattaccggaaaaggcgcaacggctgtccagaaacaaattaatcagacattcattgagacaattgcccagaccgcacttaatgcatttcagacggtagattcaatcgcaaagaagacaggggatgattctctgatcaacaatatgagtagtaatttgaatcagatgggatctgatcttggaactgttgctgcaactgttcagtccttctcagacatgacaaactctgcagttacaatgctgaacacaacaacagaatttcttcaggaaaccggttccggcacaaaaaccagcctcaattccttaaagaattctgattccggaattgattcattaactgctgccctgtccggaactacaagcacgatttctgacgcattagcacagaatgcaagcttctacactgctgtctctgatactattgacaaggctttaagttcctacaactcagatgcacaggcggcagcaaatgcattgtcttccgtaagtagccgcgtacagaatgtcattgacgggtataatcagctttctgctgcattatctgctattgcagacgcctcctcagattatcctgagattcaaaatgcggtcaatggaatcaatcagcagattcagctggcaattgaacgacagactgcactccgtgataaaattaacggtgctgcaacttcgatcactacagcaaccgcaaatgctactacattaaagagtgaacttgatagtctgatcggcgaagcaacttcttccgtcaaggcagttgagacaacttacgaacaaaatgtaaaaggaaatcttgataatctttccaattcattgaattctacaacaggttctgtctcctctatgcttggaagccttgacagcagcattgaaaatattgctaacgttaccggttctgcttcaagtggacttacaggacttcagacagcacttactaattctgctgctctgttaaaagaatcttctgaaaaactgacggctgtagctacaaaactttccactgatgattcagaaggtatggctgccgtaacaaacctgttatccgaagactccgaaacgatttcatcttttctctcctccccagtcaaactggatgagaaaaagatttatccaattgaaaattacgggtctgcaatgactccattctactccactcttgcgatctgggtaggtgctgttgttatggctgccatgctaaaagtcactgtagctgattccacaaagaagaaactattccatccgaaagaatatcagctctatatcggacgtatcctacttctgatcattatcggtttcatgcaaagtgcactcatctgtcttggagatcttttcttccttggtattcagtgtaagcatccggtaatgtttgtactaaccggtatgttcacaagctttgtctatgtgaatctgatctatgcactgactgtctcctttggagatatcggtaaagcaattgccgttgtcctgatggtaatgcaggttgcaggaagtggtggaacattcccgatccagtgtgcaccgaagtttttccaggttgtttatccacttctgccgttcacacacagcatgaatgcgatgcgtgaatgtattgcaggattctacggaacaacttatgccacagagctcggcaaactggcaatcttccttgcaccgtcattgctgcttggtcttctgctcagaaaaccgatcataaagatgaacgacgcatttatggagaagcttgaaagtacacatctgatctaatgtaatggtctaatatatataactacaaaaagccccctaaaacattaccgtgaaaggttctgttttgggggttctcttattatttcagattctctgactttcgattataaatctcctaaaaaaggttttctgtagagatactttccatctcctcgattacctttaaattcattattttcagcaatgatatttcctctctgcattacgagatcaatctttccgtgcagatctgttccttcataagaagtataatcaacagctccgtgcatcatctcgtgagtcagtgtctgttttgcatcagcatcaataatcacaaggtctccatctgctcccggttcaataattcccttcttaggatacattccgtacacctttgccggatttgtgcaggcaacttctaccagcttgttgatgctgattttgtttttcattacaccttctgagaaaagaagaatcattctttcttcaactcccggagctccattcggacattttctaaaatcatccttgccgtcctgtttctcttttgcataattgaatggacaatgatctgtcgcaacgatctgaatctctcctgcctctaatcctttccacagcgcatcaagatcctgctgtgtacgaagcggtggagacataatatatttcaatccatccggatctttatatctgtcttctgtaagtgtcagatactgtgtacatgtctcaacaaaaatgtttttttgtccgtttcttcttgcttcttcaactgcttcaagactttccttacaagaaagatgtacaatatacaccggtgcatcacctgcaagcttcgcaagataaaggactcttcttacagcctctgcttctgcaagattcggtctgctctttgcatgatagatcggcgctgtctttccggcatcaccatattctttcttcagatgctctaccacataatgattctcgcaatggaatgctgtgattccatgcagttctttcatcttcttaagaacttctaaaataccatcatcatcaatcttatagccataagtcatatatacctttgtgctctggactccgtcatccatcattgtctcaagctcatttaaaatagactcgtctacatgctggactactccatggaatccataatcgataacggctttatcgtctgccagtccatgatatacatccagttgatgatgtagcgggcatcctgccggtccgaatcccatatggtctacgattgttgtagttccgccgcatgcggctgcaacagtacctgtataaaaatcatctactgctctcgcgattccgacatcaatatccatatgcgtatgaacatcaatacctcccgggagaacatattttcctttcgcatcgatcaccttatctgtatccccaaattttgcttccaggttttttccgatacattcgatcacaccatcctcaatcaggacatctgcttcataagtgtcctccgttgatacgatcattccattttttacaagtgttttcatgatacttccttccactcctctcttagtttcagttatacttctaccgcagtctatgctttccatagctgcggtgatttttgtgcctgatgagtgctgtttctaatctctgtcttatgctcaaacagataggataccagatataatcccgagataggtcccagcaacgctccaagcattccacatacattataaatcaaatcgtacgcacttgccagtgcattccacggttgaataaataaagagagcattaacttctttcgcaaagtcattttatctttctccctccatacttttctccatgtcattccacttgtgttatcatctttgcaacatattccattttttcacaatcaacaaatgaataattcataacataaatattttcatactttttcttcttctcacttgaatgataataggatgacaatgcagccagcttaattcctttgctcttcattttatccagaaattcttcttcactcaggtttgtatctactttcattaaaaaatgtactcctgcatcttcttccagaatcttgattttagttttcaatactccctgtaaaaatgcttccaggatccggtctctcttctgctgataataattacgcagccggttaatatgtttctcaaatgcccctgaattcataaactgcgctaacgtatattgttcaaaatttgataccgtacaggaataaaaagaaagttctctgtaaaatcgttctgccaattcatccggcagcaccatataactgattcgcactgttgaacacaaagtcttggaaaatgtattcatataaatcacttttcccgatacatcaatgctctgaagtgatggaattggcttaccattcaatctaagttcactgtcatattcatcttctataatatatctatctttcgtttttgtcacccagccaagtaactcataacgtttactgattggcattacgattcccgttggataatgatgtgacggagaacaatgtatcacattgatttctttttcttccagttcttctaccttcggtccgtcctcttctatttctatatactcataacaagctcccatactgcgataaatttttgcgattttatgatatcccggattttcaactgaatatttcaattcttttcccaaaagctgaatcaaaagactggacaaatattctgttccagcaccaataatgatctgttccggtcgcaccgtcatatttcggaatgctttcagataatccgcaatgctttgtcttaattccattactccgccacacggtggattaagcatcaattcagtctgatagtcattcattactgcccgcatcgtctttgtccaaatagaaaatgggaatacactttgttctgtctgattactcgtaaaatctgcaatataagcattttttccaccggtaaggttaagcttattgctgtaaattctattttctgataaaccactctcacttttcattctgtcatcccgcaggtctgctacataaaatccactctttggaacggaataaatatatccctctgctgcaagctgaccataggcattctcgacagtgatcacacttatggccagattttttgcaagtgcacgcttcgatggaagtttttctccacttttaattttcccttgaataatgtcattcttgatacatttatacaaatattcatagagcgtatctgaccctatattttcaaaattatacgtcaacatatttactttttctccattctgacctttttgaatatatcaaaactgagtatttttatatagtcactttgtcattatactattacctatcgaattagtaaagaaaaggagatttaaaaatgagtacaaataatgaacgttatgaattgaataaaaatctggcacagatgttaaaaggtggagtgatcatggatgttacaactccggaacaggcaaagattgcagaagctgccggtgcatgtgctgttatggcgctggaaagaattccggctgatatccgcgctgctggtggagtttcccgtatgagtgacccgaagatgatcaaaggaatccaggaagctgtttcaatccctgttatggccaaatgcagaatcggacattttgcagaagctcaggtacttcaggcaattgaaatcgactatattgatgaaagcgaagtcctttcacctgcagatgatgtctaccatattaacaaaagagagtttgatgttccatttgtctgcggtgcaaaagatcttggcgaagcacttagacgtatcaatgaaggagcttctatgatccgtacaaaaggtgaaccgggaaccggtgatattgttcaggcagttcgccatatgcgcaaaatgaacagtgaaatttccaaactagtaagtatgcgtgaagatgaacttttcgaggcagccaaacagttgcaggttccttatgatcttgtcctttatgtacataaaaacggaaaacttcctgttgtaaactttgctgccggcggtgttgcaactcctgctgatgctgctcttatgatgcagttaggcgcagagggagtctttgtcggttccggtatcttcaaatccggaaatccggcgaaacgtgctgctgctatcgtacaggccgttacaaactatacagatgcaaatctgatcgctgaactttcatctgaccttggtgaagctatggtcggcatcaacgaacaggaaattgaacttctcatggcagaaagaggaaaataaaatgacaatcgcagtacttgcccttcaaggagcattcatagagcacgaacagatgcttcaaaagcttggagttcataccattgaactccgacaggcttctgatctgcaaaaagattttgatgggattatccttcccggcggtgaaagcaccgttcagggaaaactcttacacgatcttaacatgttcgaacctttaaaagaaaagattcaatccggaatgcctgttctggccacttgtgccggaatgattctcctggcttctgacattgctgaacaggacgaaacctattttgaaaccattcctatgacaatcaaacgaaacgcctatggtcgccagcttggaagcttccatacaaatgctgaagcagccggtatcggtgaaattcctatgactttcatccgtgccccttttgtagaatccattcatgctgacgcttccggaaacacacctgagattctcagtatcgtacaggatcgtattgtcggagtgaaatataagaatcagatggcatttgcatttcatccggaattagatcaggacacacggattcatgaagcatttctagggatgatcagatagttatcgcagcattctccaaggtcccgtgcaagtacggactttggctcgttgctcgcgtaaataaaagaaaccgacaggatgttttctaaatgagcttatcattttcatcctgtcgatttctttctttttactaatactattaagcaggttttttacattggtgttccaacctctatcagatttccatccaaatcataaaaacgaacaatcttctgtccccagctatgcgtcatcaaacgattcacatactttatatccggataaagcttatccagtttttcgacaaaagcttcgatattcttctcctcaaaatataactcacaggaattactctctgaaatgatatctctttccagaaagttcttccaaattgttttctcctgaagaacaagtccctctgtcagaatgacattttcttcattatcaagtattacatcaagtccaaataaatcatgataaaatttcttcgatttctcaatatcttctacaacaatcaaaatatttcttaatctcatacttcataatctccttgtgaggttttatacatctactttccactctgccagcggttttagctcaatctttgttccgtttggaagcgaaaaccaatggtcattgattgcttttaccggatacgctttgattttctccataatctctgcctctgaatctactgcaatggaaatgtgatcatatccattttctgatgctgcattcagctcctctacttcgcaaagctgaataccttctttgtaccagcattttcttcccggtttttcaccgatttctctccacatatgcatctcaaatacatcttcaaagaatctctgagcttcttcatatgatttcgtgcggattgctgcgtgatcgattcttgccattttgacacactcctttttgcttattctactacctctatattacgttatttctttttatttttcattacaaactcaaattgtttaacaaaaaaacagcgctttcgcactgcttctcatttctgtctatattccatgtaccttcaaaactacatacagtcaaaaccaacatcatcatccaaacctatcactgctttggttatgccctcgacctattagtaacagtcagctccatgtgttaccacacttccacctctgccctatctacctcgtcgtcttcaaggggtcttactaacttgacgttatgagatatctcatcttgaggggggcttcacgcttagatgccttcagcgtttatcccttcccggcttggctactctgctatgcctttggtaagacaacagatacaccagcggccagtccatcccggtcctctcgtactaaggacagctcctctcaaatatcttacgcccacgccggatagggaccgaactgtctcacgacgttctgaacccagctcgcgtaccgctttaatgggcgaacagcccaacccttgggacctacttcagccccaggatgcgatgagccgacatcgaggtgccaaaccactccgtcgatgtgaactcttgggagtgataagcctgttatccccagggtagcttttatccgttgagcgatggcaatcccactttataccaccggatcactaagtcctactttcgtacctgctccacccgtcggtgtcgcagtcaagctcccttctgcctttgcactcttcgaatggtttccaaccattctgagggaacctttgagcgcctccgataccctttcggaggcgaccgccccagtcaaactccccacctgacattgtcccccagccggatcacggctgctggttagaaacccagtactgcaagggtggtatcccaacattggctccatggcaactggcgttaccatttcctagcctcccacctatcctgtacatgcaataccgaatcccagtatcaagctggagtaaagctccatggggtctttccgtcctggcgcaggtaaccagcatcttcactggtatttcaatttcaccgggtacattgttgagacagtgcccaaatcattacgcctttcgtgcgggtcggaacttacccgacaaggaatttcgctaccttaggaccgttatagttacggccgccgtttactggggcttaagttcaaagcttcgcttgcgctaacctctccccttaaccttccagcaccgggcaggcgtcagcccatatacctcacctttcggttttgcatagacctgtgtttttgctaaacagttgcttgggccaattctctgcggccatcttactggcactccttctcccgaagttacggagtcattttgccgagttccttaacaatgcttctcccgtcggccttaggattctctcctcatccacctgtgtcggtttacggtacgggtatcctgcaaacaatagcggcttttcttgacagtcagctcacgtgcttccctacttattttcagtccacatcacgtcttcagattaaagagcggatttgccaactcttctcctacctcgcttgtaccggtctttccattcccggctcacgctctctgcctgtgtccccacagttctgttacaggatagtacaggaatttcaacctgttatccatcgactacgtctttcgacctcgccttaggccccgacttacccagagcagatcagctttactctggaaaccttagatattcggccggaaggattcccaccttcctctcgctactcattccggcattctctcttcttaaaagtccacagctccttacggtactgcttcgtccctttaagaatgctcctctaccaattgaattaattcaattccaaagcttcggcagtgtgttttagccccggacattttcggcgcaggacctctcgactagtgagctattacgcactctttgaatgaatggctgcttctgagccaacatcctagttgtcttcgaaatcccacatccttttccacttaacacacattttggggccttagctgttggtctgggctctttcccttttgaccacccaacttatctcggatcgtctgactcccatacatcatctacacggcattcggagtttgatatcccttagtaagctttgacgcccccttaggaattcagtgctctacctccgcaagactcgtatgaggctagccctaaagctatttcgaggagaaccagctatctccgggttcgattggaatttctcccctatccacacctcatccccacccttttcaacggatgtgggttcggtcctccattgccttttacggcaacttcaacctggacatggatagatcacccggtttcgggtctactccgactgactatgcgccctattcagacttggtttcccttcggctccggacctttagtccttaacctcgccagccagcgtaactcgccggaccgttctacaaaaagtacgcggttgagcatataaagctcttccacagcttgtaaacatatggtttcaggttctttttcactcccctcccggggtccttttcacctttccttcacagtactatgcgctatcggtcactaagtagtatttagccttacggggtggtccccgcatcttcccacaaggttccacgtgtctcgtggtactctggatcccgccatgtcaactcgtctttcgcttacggggctttcaccctctctggccggctttcccaaaaccgttctgctaaactcgttgaatcaattccgcggtccgaaccccagcatgcacgcacgctggtttgggctcttccgttttcgctcgccgctactcacagaatcacatgttgttttctcttcctccggctacttagatgtttcagttcaccgggttcccttccttaagttatgtattggcttaaggatacttgaggtttgctcaagtaggtttccccattcagaaatctccggatcaaaggatatttgctcctccccgaagcttttcgcagcttatcacgtctttcatcggctcttagtgccaaggcatccaccatacgctcttatcagcataaccaactcgacctcatcccacgggaatgggataacgtccacacatacatagcgttgtatgcgttggtgatagtcaatttgttttaagtctgttttcttcagactgtaagttaatgttgttaacattacctcggatgtcttgattagatatttatctaaatctattgatttttactatatgcagttttcaaggtacataagatgaagcccttattcagttcttcatctgactgactttttcatcagtcatcagagactaaaagctttcttttaaactctgatcactggtgaagaccagctttatcgcagaacctctcggtttattttctttttaatttggcggccacctactctcccacaccgtctccagtgcagtaccatcggccgcttaggtctttaccatcgtgttcgggatgggaacgggtgttacccctaagcgcatcgccaccaaaagctttggttacttgataacccaacaatagacaacagtaaaaactctctacttctttcttccgttttagttggattgttccagacgaaagaaagcatttcttccttagaaaggaggtgatccagccgcaccttccgatacggctaccttgttacgacttcaccccagttatcggtcccaccttcggcagctccctccttacggttgggtcactgacttcgggcgttactgactcccatggtgtgacgggcggtgtgtacaagacccgggaacgtattcaccgcgacattctgattcgcgattactagcgattccagcttcatgtagtcgagttgcagactacaatccgaactgagacgttatttttgggatttgctcgacctcgcgattctgcctccctttgtttacgccattgtagcacgtgtgtagccctgctcataaggggcatgatgatttgacgtcatccccaccttcctccaggttatccctagcagtctctctagagtgcccggccaaaccgctggctactaaagataggggttgcgctcgttgcgggacttaacccaacatctcacgacacgagctgacgacaaccatgcaccacctgtcatccctgtcccgaaggaaaggcaacattacttgccggtcagggagatgtcaagagcaggtaaggttcttcgcgttgcttcgaattaaaccacatgctccaccgcttgtgcgggtccccgtcaattcctttgagtttcattcttgcgaacgtactccccaggtggactacttattgcgtttgctgcggcaccgaacagctttgctgcccgacacctagtagtcatcgtttacggcgtggactaccagggtatctaatcctgtttgctccccacgctttcgagcctcaacgtcagttaccgtccagtaagccgccttcgccactggtgttcctcctaatatctacgcatttcaccgctacactaggaattccgcttacctctccggtactctagattgacagtttccaatgcagtcccggggttgagccccgggttttcacatcagacttgccactccgtctacgctccctttacacccagtaaatccggataacgcttgcaccatacgtattaccgcggctgctggcacgtatttagccggtgcttcttagtcaggtaccgtcattttcttccctgctgatagagctttacataccgaaatacttcatcgctcacgcggcgtcgctgcatcagggtttcccccattgtgcaatattccccactgctgcctcccgtaggagtttgggccgtgtctcagtcccaatgtggccggtcaccctctcaggtcggctactgatcgtcggcttggtaggccgttaccccaccaactacctaatcagacgcgggtccatctcataccaccggagtttttacccctgcgccatgcggtgctgtggtcttatgcggtattagcagtcatttctaactgttatccccctgtatgaggcaggttacccacgcgttactcacccgtccgccactcagtcaccaagatcttcatccgaagaatcaaatcaaggtgcttcgttcgacttgcatgtgttaagcacgccgccagcgttcatcctgagccaggatcaaactctcgttaaaagtgtttgtatccagttcagaaccaactaactagctaattcttccctttttactgttgttttggtttgtttaaaaaccgttcttaaaaatcttctcttaaagaaattttcaagggttgttgttgtctattgttcagttatcaaggttctttgtttgtgtcgttctttccaagcgacagcttttatattttatcaaaagcttttgtctttgtcaagaacttttttatttttctttgtcgctcttttcaagctttcctttgccgtctcacgcgacagcctatttaggatatcactttcagaactctttgtcaacaacttttttgatttatttttcaatcatttcattgatttttaaatcttccagtttccttccgatcaagaatgtcccgcctccgcgtcttctttcatcttccgttcctctgttgttttccttgctgttcctcagcgacgaatgttatcttatcacagctgtttttaattgtcaatgttttttatatatttcatgcaattcagactattctgaaaattagtatctgcgtttccaaactctaacaaatagatccgatagccaaaacagctgttttgcaaacgtctgaataatgatcaaaaaaacaaaagagaccatgctcaacacagtctctctcttttactattttattttcttttcaacttctctcggaagacgttcgtacaaccatgtcatacgtttcaatctcttcaccgtctcttcatcaaactgtcccttctccattctccaggtccagtttccgccaagtgtagacggtacattgattcttgccttgccatccaggttcaataaatcctgcatcggagttacgcaaaggttcgccttactgctcattgcaagtcggatgaaatcccacgccagatcatcttcatccaggcgttgtgcattcatatactcttttgcaaagtctcgcgttgctttatctgtactgtgataccatcctcttgttgtatcattgtcatgcgtacccgtatatacaacactgttttccggataattatgcgggagatatgcagagcctccatttggatcaaatgcaaactgtattactttcattcccggaaatccactgtcggatagcatctgaagtacactttctgtcaggaatccaaggtcttctgcaataatattcaattcgccaagtttttcttcaattgtacggaacagatccattcccgggccaggcatccatgttccatccactgctgtctcatttccataaggaatggaataatattcgtcaaatccacggaaatgatcaattcttactacatcatataatttgagacaatgccggattctcttaatccaccagtcgtattctgtctttttatgatattcccaattatacagcggattgccccacaactgtcctgttgcagaaaaatcatccggaggacatcctgctactgccaccggattattctcttcatcaaactggaataactccggagatgcccatgtatctgcaccgtcaaatgcaacataaatcggaatatctccaacgatctgaattccctgttcatttgcataagcgtgaagctgtgaccactgtttatcgaattcatactgctggaatttgtaaaaattaatctcttctgcaagttcttctctcgcattctcaagtgctgcttcctcgcggtttttcagagcttcttcccattcattccagctgattccacctttgctgtccttgattgccatgtaaagactataatcatccagccaatacgcattttctttgataaagttatcatatgcttcatctttttcgaaacgctcaaatgcctttttcagcactttaaatcttgaattgtagattttctcgtaatcaatactgtctgcctgctctccaaaatcatacactttacattctttttttgtcagaagtccttctttgatcagtgtcttcagatcaataaaatatggatttccagcatatgtggagaaagactgatacggggaatccccgtatccagtcggtccaagcggcagaatctgccagtaactctgtccagcctcttttaactgatcaataaatttatacgcctcttttgagaaacagccaattccgtattttgatggcaatgaaaataccggtaataatactccgctcgctcttttcacgttcttctcctcctcttacagatgccagatatctctgttgtactcttcgattgttctgtcagatgagaaataccctgctttcgcaatatttacaagtgttttcttagcccatgttttctgatctacataagctctcaatgcttcttctttcttttctttatagctgtcgaagtcaaggagggtcatgaaccagtctttactgataatctcatgctgcagtctctcaagattctctttctctccaactttcagaacttcctcgcttgtaataaagtcaattgctgccttgatcgcaggattcttctcatagaaatctcttgcaacataatcagcctttgcataatgctcgattacttcatcactggatgcaccgaatacaaaaatgttatcgtttccaacgagttcatgaatctcaacatttgctccatcctctgttccgagtgttacagctccgttcagcatgaatttcatattacctgttccactggcttctttagatgcaagtgaaatctgctcggaaatatcacaagccggaattaatttttcagcctttgttacgttataattctcaaccataacaaccttcaggtatggacttacctctggatcattgttgatgatctcctgcagacaaagaatcaaatgaatgatatcttttgcgatcacataagccggtgctgcctttgctccaaagatagctgtcaccggtgcagccggaatctttcctgctttgatctcaagatatttatcaatgatatataatgcattcagctgttgacgtttgtactcatgcagacgtttgatctgaatatcaaagattgtatcagggcttacttttactccctgtgtctcttccagatatttgcagagtgcttctttatttgcatgtttaatctctactaatctgtcaagaaccttctcatcatccttaaatgcaagaagtttctcaagttcagctgcatctttcttgtatccctctccgatcagttcatcaagaagctctgtgagagccggattacaatgcagtaaccagcgacggaatgtaataccatttgtcttattgttaaacttctccggataaatcttgtagaaattattcagttctgtctctttcagaatctctgtatgaagagaagcaacaccgtttacactgaatccgtaatggatatcaatgtgtgccatatgaactgtatcatttctgtcaataatagaaacgctttcatcttcatattttcttcttactttatcatccaacacttcgatgatcggcatcagctgcggaactaccttcttcaggtaatatacaggccatttttccagtgcctctgcaaggattgtatggtttgtgtatgcacatgtcttagaaacaacttcgatcgcctcatccatgtctaatcctctctctacaagaagacggatcagttccggaattaccattgtcgggtgagtatcattaatctggatcactgcataatcagcaagatcatgaaggttgcatccctttgctgtacattcatcaagaatcagctgtgctcctgcacttaccatgaaatactgctgatagattcgaagcagtcttccgttctcatcactgtcatccggatataagaaaagtgtcaggttcttctcgatgtcttctttattaaaagcaattccatcctctacgattgtctcatctacagagtcaatatcaaagagatgtaatttatttgtcttattgttatatcctgttacttcaatatcatacattctcgcatttacattaagtcctttgaaagataccggataaacaacatctgtctttttcaaccaggatttttcttcaatccatggattcggagtttctctctgaaggttatttttaaactcctgtttaaaaagtccaagatgatagttcagtccgacaccgtctcctgcaagtccaagtgttgcgattgaatcaaggaaacatgctgccagtcgtccaagtccaccattaccaagtgacggctctggctctacttcttcgatttctgcaatattcttaccgttctgtgcaagtacatcttttacttcattaaaaataccaaggttgatcatgttgttagaaagcagttttccgatcaagaactctgcggaaatatagtaaagttttttcttactatctgtacgttccttttctcctgccatttcctgcaccatactaagaagtgctccgtagatttcttcattggaagcctgtgcaatctctttaccaagtttctgctgtaatgtttcctgaatgttcatttgaataatctcccttcaaatctgattctgtttttatgttacatactttgtttctttgtttttaacttatgattgtattttaatacgattatcttcaaatatcttgcaatatacttgcactttattgtacaatactatcattcttataattcaatctagtttgaccagcaggtgtgtcagatatcattttattgaaaggatctcatttttatatgaacattaacgaatatcagaattatcatgaaacaaaagcgcatacatccgcagaatttccttataatacttatctctgctcgatccctctcgatttccctggagtaccactgcactggcacgatgagttggaacttgttgtcattaaaagagggcagggttttgtttctgtggactttgataagcgtctggttcacagtggagatattattattattccccctagatgtctccatgccatcgaacaggatgatacttttaaaatggaatatgaaaatattattttcaaaccagatttactttcttccggagcaaacgatctgtgcatgattcaatacatcgttccacttcttgacggttctcttcctattgaatattttctcactccggctctcggatcttttgaagccttaagcaattgtatccgacagattgaccttgtctgtgctgatcagacacctggatggcaacttgctgtgaaaagttctctgtttaactttttctttcttctgatctctgaacgtcagaaaaaaacagtctccacttcctccaattccaaatctttggagaaaatgaaaactgttttaaaatacgtagaaaatcattatacagaaaaactaacgattgatgacatggctgaacttacttattatagtaaatcccatttcatgaagttcttcaaagcccacatgggaatcggattcactgaatacttaaatgattaccgacttacaatggctgccagacttctcaaatcatccgatgactctattctgatgattgctgatgccagtggttttgacaacctgtcctactttaaccgcattttcaagagaaaatatggtgtttcacctggtacttacaggaaagcatagtaactatccagaaacaattatgagtgataatacagttcgattggatcaatcggatcaaatggatgttcttcttccattttcttattccgcccacgacgtttcattagctcaccactcttgttgtatacccagaaagaatatacaaggagcttatttaccttcccgatcttctcttttgtcgtcttattataatagacaccacctgtcttgaatgcagtcttcttatggatcaaagagatcagctctgtctccgttttgaccggttcaggtaagattgtatatgcccgtccgacacagtctgtcttgtgggaatcacttccacctgtcatcaccttaccgtatttctctgccagttttaaggcaccagcattagaatccttcggttcacaacaattgaatgtctcaataaaatcgaatcgtttaacaatctcaggtgagaggtagtatcttctcgcatgagtgaagctcatgtacttttctccgcatggatgtgccggtcccaaaactccaccattgcggtgaaccaaatcgatcagaagtgcaagcggcattccacgcatctcaagtagacgcatctttacaccctctggcataattacaagaatatgccctgcatctctcgtatcatattcaattcctttgagtaccacaaaatcggtatgtttctttccttttaaattctttttccagtagcggtagccattatatgtgtcgtgatccgtgatcaccattccctgaaatccgtgttccttgagtatcgtgatatattcctcaatccctaccctgctgtctatggacccctctttcacgtgacagtgcatgtctatcttcatatttgagtcctccttttccgcagtcctgattttatcaaaaagtactatgtgaaataactttattttcgttctttaaaaagactgctaattgataaattcattatacctcgtttatataggagtgacaagccatcttaattatagtatttatttttcaaaaatgaattttcaaattacttttcatctatacttttatagccaaatcaggagtttgacagttaaattctagatatcatctatgttgttaattgtatctattattattactgcggaactttattctacattcaaataccatatgaaaatcggggagactactaggtgttgttcattttttctaagaacacatgtaaaaatttcctctaagatttcgataattgagtttaatattcaaattaaataatgtataatagtgactccttcgtgcgaagctgagaaagaagatcaaagatatttcaattcacctcctcacaagaagaaccatattgctacaacgatgattaacaccgtattcttcaagatttcaactcacatcctcacgaagaggatgactatcatacattctttcgccgccccagcgatttatatttcaactcacatcctcacgaagaggatgacaatgctacctataattggattgctattggaagctatttcaactcacatcctcacgaagaggatgacagcagtagaagtcgttccaatctcacagaggacatttcaactcacatcctcacgaagaggatgaccagctccgtgattatttctcatgtagtcagacacatttcaactcacatcctcacgaagaggatgacaagggtaagcaataaaaatggaatataggctgtatttcaactcacatcctcacgaagaggatgacgattgtatgttctcctaagtgtagaaacacaatatttcaactcacatcctcacgaagaggatgactatgagcatcgattattcagatatggcatttccatttcaactcacatcctcacgaagaggatgacctgctgtcactactaatgatacacttgacggttatatttcaactcacatcctcacgaagaggatgaccttcttgccatgatttaatcttcctttctttaatatttcaactcacatcctcacgaagaggatgacagtgttctttcaataactcgtagtcagtcattgtcatttcaactcacatcctcacgaagaggatgacatttcactatgtttggttatgccgttcatagagtatttcaactcacatcctcacgaagaggatgacaatttctccgttagattttaactcttttccagacatttcaactcacatcctcacgaagaggatgacatttctaggcggaagcacttttgcgtactgaatatttcaactcacatcctcacgaagaggatgacggcggtaagactacttattttggtagattatgtatatttcaactcacatcctcacgaagaggatgacgctgtcactactaatgatacacttgacggttatatttcaactcacatcctcacgaagaggatgacagcaattttaaacaaaaataatctgtttaaaatcgcatattatatcaacaataaacattttatatctattgttgatatcttttttcattttcacatatatttttaagcctagttttctcctttttttggtgcgaatgtcctaggaaatttatgtgcacttatcattcgcactagaatatcaacgtatccttaacatcaaaaccaggcttagcaccaatatgctctactttatttttatatttttcacccagataataaaatctaaggctatctacctctttatctataatgttctctaaaatattttttacttgtctacatttggttgcatccatttgacattcaaataccgaattctgtactctctgtccataattagtacattcttttgcaacttttctcaatcgttttcttcccgctgctgtttgagtatttacatcatatgtaatcagaactaacatctttccacctacttccagaaaaacggagggtattcatctaaatctcctcttaaatacctggctaataacatactctgcacataaggagccattccccactctattttttcatctaaaaatggatgtttaatggtttcctgcttcttagattgccacgctgataagaaagcctttcttccttcatctgtcataataaccgcaccattttctttttttatgaaatatttttctttcataatctttttattaatcagtgtcagtacaaatctatctaccataacgcttcggaattcttccataagatctagtgccaatgacattcgaccgggacgatctgtatggaaaaaacctacatatgagtccaatcctactgcttccaatgcacctccgcacattccagccaatagagaatatccgaatgatagcatcgcatttacattatccaatggcggtcttttatttctcccatggaaataaaaattgtctttttgctgcaaaatcaaatcgtcaaataccgaaaaatatactgaagctacttctccttctagtccaagtagttcctctgcattttcacattctcttatttttcccatgctctgagctaaaaacactgactttttctttatcgtttccacatctaaacgcagcgcataatctcttgcagccctctccagaatccaccttgaattatatacttttccaagaataaaatttcttgctatatgtacactttcatcccgattatcactgattctatattgttgttttcttaatgtaacattcccttttacttcacctgtaactcgggctagaaatcttccatttccagacataaaagacaaatcaatattcctctgtgcacatactcccataagcgccggactcgctcctgtatagccaaatgtaattatcgcttgtaaattatgtaatggaattctcccgatttctttttgatcttccaataccacaacattttctccatctaaggacaaatatttatttccagatgtcacatacaacgtatttaaaagtcttttcattctttttcctcttctgaaataattttatcaatatatccggaaactgactttttcttatttagaacaggtagacaaatgtcttttaatgagcatgcattgcattttttacttattttcacttttggagtataacattgcgcgtaatacttatgcatttccgcaaatatttttctgactttatcgcgtatttcatccgtaaattctacttttgcacgatgctttgtctctccataataaatatagccatatggtattgtgcaacacaacatttcttctaaacataatgcctgtgccgttacttgaaggatatcggaatcatccgtttttggttttcctcttttatattctatcggaactactttataaaatccttcttttccggacaaattgattccatcctttgctttatgaaattctactacatcacattcaccgctcactcccatttcccgggagtgaatcggcattgctctcacaactattaaatctcctcttttttctttaatacttgtatcgtgagcattttcatgaagaatcttaccttccactgttctgacattttcttgccactgtagttctatatacgctagtgcccattgtctcctgcaaaattcaaaatgctgaattccagataattgaagaaattcttcttccttatacaaattaaaattcctccggttgtttgcatccttctacattccatgaaatctcgtaatcctcgaattctctcggatgttcttttttagctttaatagtgaatcctctttgaattttaccactggaaactgctggtgttttttcatcatgctgccaccagtacattttgcaaacttccatacttccttctggtcttgcagaagacgcatcattctcaaataatgtcttcaatgcttcttttaatacttccgcatcttcctgactaaaacctgttttttcagcaagctgcacatttacgcttcccatcaccttatatacagcaaatccaactctgtgttttgttcccatcgtatcagaagctttactttcttttccggattcactattcacactttttgtaatctgcatactgataatatcgattggtgataaacttactgcctgatgaatagaaacaggacctcgtactccgaaagacactggaattcctttaaatgcaaaaacttgtccaaaagctcttacatctaaccattctttgcatgcaattgctgcacaagcatcacgatttgcatttttcttatttcccatctctgcttttaattccgcacagctatccgctctgtcttttaaactggtataagcatcatctgttctatcatctgactgaacaaaaatcttttgtcctaaatcctgaaaacgatttctaatttttctcttaatacatacatctgaaatttctccaaaaccatccatattaattcgcggacggtttccgtttaatggatctccgtttgggttggcattgtttgcactgataaataatgtgaaatcaatttttccttttaattcgctcatggtctactcctcctctttttactcttctgaactttcttctttttcttcagacttctctttctttaatttcaaatcatatgcctgattatggaaaccaagtagatataaaccttctaatctactgttatcagtaaatgtgtttttatcaaacagctcatcaatttcatgcaatagattttcgtaaaatgtcctttttgcaatatctagcttgttcaaatatggtcgaatattttcctctataactttccacgtttcatatggtctttgagagaaagtactcatatatctttttgcatttgtaactcttccattatctttctcgtcatatgtcaaatattcaattcgatctgcgactgccagcagtcttccatacagataatttctatctgtttcctttttgtctaatgccacgttccattcctccttatatctatcctttttatccttttttacaaacgaacatgctaatgtcaaaactctttcccaatttcttcgttccttatatgctaatggattggatgcctttgatactgcaagcatcacgtaatcatacggaaccctagtaccattccatatacatggaagcaatctttgagctacttgtgcatagagttttttaccattggcatccactatagacaccgttcccttattctcaataccatataaaatatctgcaatatctttaacaccaatcattcccgcaaattgtattctttctccatctttccattttgtatgaatccagttacaatcgttatgccatttttctatatttttcagatatctgacagaattcagctcttgattttcaatcaacgctaatcttcccggtgttgctgcatcaaaagcaagcaaaatcatattcgaggtattatctatctttttaccatagcctcttagtgccttatagaacttatcggcggtgattggatttccatcggatacaatctcctctgtagaccagtcatcttcccaatcatcctcagcatttccaacatattccctttcatactcagatacaattgcctctgtatccctctcccattttggcatgcttaattgatttgactcccatgtcacaattgtcatagtatcgaaaaaagtgccttgttttcgaataatccacttcaaagcattgtgcgctttttgcgaggtctcatttcctactgcaaatgcctcttccttacttgtaaaacgtcctcgataggtgaaattttgactgtcatttgcagaaatcaactttgctccatcaccttcatttctgattttctttgaatgaagataagaaatagattccatatttcctgtcaaataacatatacctttttctttttcctgtgatctgacatattctatataacattcctgcaaagttctgtctttccaacattcatccggagtttcttgatatattttctcatcaaatgaccgtataataaatcgtacaaaagcttttggttggggaatcccttgaatattttctttctcatctatttgattttcttcattaagttttataattttatgtgcaactaaatcttgaattaatgtcgattttttcaaatactcataaattgctctgaccttttcatgacaataatcggattctacccatttttcaagctgtgaaatatatagctcgctacatactccatcgtctttataatattttttatagtcactggcaagatatctcaaattatcacataatggatgtggctcttttccggctgtacgacttcccgatttttctgtaactggtataatcgtcaatttgtcattctgatccacctgttctgcacgaacaaaattaccgtcttggtctatcgttaccgttatctgtgccgttacagttgtatgaaatggtggaagaagtacataagggatatctcttcgatattcgataactccaatcttatcgctatttttctcatacaaatcaatcagttcgtttatccaactcaatcttccacctcctcatctgtaaactcttctaatcctataaaattattcacttcttttccaaatacttttctttccattggacgtatatgtcttttctccgtacaatcctccggtctggtaaattctataattccgccctttttcattaccggcctccagaaacgcactgtcatctgatctttatcctcttccagaatcgcctcttccgcataagtaatcccatgatacataaatccataacccacttccccaggcatcgtatcataataactcttgtcttcgccaaatacacacggttccacaaatgcctgacattctcttgttcctaagaaaatatctctgcgaccacctcgttttaccatccttttcgcaatattatgatgcttgttttcatttctatcctgctccagctccggatgattgagattcatctcaaaatgtgcccgcacctgatatctcacatcttttaaataagtataatatgccagttcatttccaccattgtatgcaatcggttgaattcctttagtctcagtctgaattggattcattactcttaccgcgtcaatgatccaaataatcgtaggcttccagtaaatactttccgtaattccttttaatgcttcataagttggaatatgataacttgtcttttctcctcccactctcataaccggatctgaaaaaagcgcatatgttccatacacttcaaactctattgtatttctgtatctttccaaaaatctcacctcctctataacatttgcaattccatattaggttcattcacaacacctacttccttgtcataatatccatcacacaataccaatatctctccattgcaaatttcatatatagcatttccgagtttttcttttcttttttcagaaattccaactgtatatctctgcaatttttttaaaatctttttctgctcttctatctcgagataatcctgcgataatttatccaatagttctctcgcttcatcattgtatggaaccacaacactaactttataatcattagaaataacttcaaacgcctgtcctgcggtcaaaaaagcctgcggtaattttgtctttactttttctccatttcttctgatatattgtaattgtcctactttattttctcccaataactctataatcgtggttgtttgtttatctatcagaaatttcgtttcatttgttctaagttgggaatagtaatttaaataatatgcttttattgcctcttctgaatccaatgtatctctgaattttaaagaattatttttataatcttccaatactttttgtaatgctgcctgcgcatttctaatttcctgcaaatgacttaatttctctgctttttcggacatctgtacaatgaaaacagttcccattcttcctaattccttatgtctattgcatcgtcctgctgcctgaattatattatccaaacctgctttagacctcacaacacacccgaatgaaaaattcactcctgcttcaacaacctgtgtacttacacatataatctttttcgattgttcattcaaaatttgttttatagattttaatgtatctaatttatgttgtggacacatattattactcaaatgaaaaagttcatattcttgtggacatatcgcttttaattgttgaaatgtattcattgcacaagccgtagtattcaaaataaccaatgtactttgatattgttctgttttttccttcacaaattcacttaaatcttctatctccataccaccaggatataattctgttgcatctttaatatctgtccttttaaaagcatttgcatacttttctggtcttcccgccatttctatacattcacaaatgttattctcttttattggtgccaatgttggctgcgttgctgaacacaacacaactgtcgtaccacaaaattgagtaagaaaattcacagctaaattgaaaagttccatacattttacaggaattgcctgcacctcatcaaatatgataatactgttacataatgtgtgcattctacggatacagcttttctgagctgaaaacaatgtattcaatatctgtactgccgtagtcactataatcggtgaatcccaagtttcagtgagtttgcgatactggtcttcttctccttcttcgcaaaccacattacaatgatgctctaacacaacatccgctttgcctattgcttttcgaatctcctcggcattctgaatcaatatagaattgaatggtgctatataaataatgtgttgttttttcatctttttcgcatgatacagagcaaagcgcaaactgctaagtgtttttcctgctcctgtcggtacagtaagtcgataaagattttcttctttgtctgcagcttgtctacacaaatccgaaatttcttgacgaaaagtatttaacacatttccattcgacggattattatgaatttcctttgacatatattgttcaaatttttctatacattcattccaaatcttctgggtctcttccaatgaaattctttttgataacggaacatcttgaaaaaaacaagccgtatccgtccagtccccatcaataagtaaagataaaaccattctcagatacattcccataaagaaatatctgttcccacattttctttttgatatttctgactctttatgaaaaatattgatttttccttccatttccttatatgtttgaattgcttttttacagtattcttccaacatctctttatcataaatctgaaagaattctttctttatccagtcataatctatttgtttctcatcccgttgttgctgtaaactttgtccattatctagattgatgcaatctcccattccgtgatgaaaatatataaccgtactgataaattctgaaacacttttttccttcagcaactccctgattaatcttccgccagcagtagaatgatccaaaccatgtttatgagtatcatctccatattgtagaattctctcaaaatcttcttgattttctcttcccaactttcctacatcatgaaacacccctatcaagctaaccaatatcttcaattctgaaagagaacaagtctccgctgcatagttcgcaacattttctgaatgctctttcatcgtctgatatctacctgattcatagtctacatgcgccaaatctctttttatttcgattttattttccatctagccctcttgtgttatctgtgtgtatttttctttattcagtcttctattttgtatattttcactatactcctagctgttctttttgtcaataatgagttttacatacttttccttatgtaaattacatttttaattaaattttatagtcaaaccaccttttgatttgactacaaaaccatcttacatactttcccttatgtttttcaactcacagatatttactatatctgacatttcataacagatgaaaccttataaatataatttacatctcttatgtctttgtccagttctattcatttgtgcctaaacaacttgtaatttctgaaaaactgtacaatcgttattatacgaatatatttaatatttttcaagctgtaatctcttgtgataaaatttgttttccggattcgtttcactggaatataaatttctgttttgtattgtgtaagcaaagacagtcctactattgccatgggcacatgtaaggcaggagcgttccgaatacactttgttcagtatgttaaaaagagcaagaacaggtaccacatacggtaactgttcttgctcttatcttactgcaccttcgcaatatcgatcagtgacagtttcttaatatctgtattctcaagacttgtgatcaatgcatatgctgtgtcaattgcagtcagtacattcacacctgtctcgattgcatttctacggattacaaatccatctcttgaatgctctgcaccctgtgccgggatatcgataacaagatcgatcttatgtccgaggatcaggtcaagaaggttcggtgattcctgctcgatcttacgaaccggagtagcctttactcccgcctcattcagcgcacgtgctgttccgcttgtagcaaagatatggtatccgatcttctcaaatcttcttccgatctctactgcatctgcatggtcttcatcgcggactgtcataatcatgtttttatgcttcggaagcttgattccagctccgataaatgctttgtaaagtgcttcatcaaatgtctttgcaattccaagacactctcctgtagacttcatctcaggtccaaggctgatatcagctccgcggatcttctcaaaggagaataccggcatcttaaccgctacataatcagcttccggctgaagtcctggtgtgtaaccaagatccttgatcttctttcctgtgataacctgtgttgccaaaggaacaatcgggatacctgtcaccttactgatatatggtactgtacggctggaacgtgggtttacttcgattacatatacatcatcttcgccgcacacgataaactggatattgatcataccgataacatggagtgattttgcaagtcttcttgtatactcagcaatctttgcttttgctccttctgtcaggctctgtgccggatatacggaaatactgtctccggagtggattcctgcacgctcgatatgttccatgatacccgggatcaggatatcagttccgtcgcatactgcatcgacctcaatctcttttccctgaaggtatttatctacaaggatcgggtgatcctgtgcgattctgttaatgattccgatgaattcatcaatatcattgtcgttgatcgcaatctgcattccctgtccaccaagaacgtaggaaggacgaaccaatacaggatatccaagtctgttggcaacttctttcgcttcttctgctgtgaatacggttccacctgtcggacgtggaatctcgcactcttcaagaatctcatcaaagagctcacggtcttcggctttgtctacattctctgcagatgtaccaaggatcggtactcccatcttcataagtgcttctgtcagcttgattgctgtctgtccaccaaactgtacaactgctccgtccggtttctcaatatcaacgatactctctacatcttccgctgtcagtggctcgaagtacagcttatcagcaatgtcaaagtcagtacttactgtctccgggttattatttacaatgattgtctcatatccgtcttttgcaaatgcccatgtacaatgtacagaacagaagtcgaactcgataccctgaccgatacggatcggaccggatccaagaacaagtactttcttcttatcttttgtctgttcaacttcattctcgcttccatatacagagtagtaatatggtgtctctgcggcgaactctgctgcacaagtatctacgatcttatatgctgcaacgataccgtttgcatgacgcatatcgtgaatttcctgctctgtcttacctgtcagttgtgcgattacattatccgggaactcgatacgttttgcttctgcaagaagttctggtgtaagttcctgtgtcttcagagctgtctccatctctgtgatgatcgcaaatttatcgataaaccactcatcaacttttgtaatctcgtggatcagatcgtaagagattcctcttctgcatgcttctgcgattctccacatacgcatgtcatctactttcttcagctgatcgatcagttcatcatctgtcagatctgtgaagtcataagacatcagactgtctacatgctgctccagagaacggattgctttcataagagctccctcgaagttattacagatgctcataacttctccggttgctttcatctgtgttgtcagtgttctcttcgcactgataaatttatcaaatggaagtctcgggatcttaactactacgtagtcaagcattggctcaaaacttgcataggtcttctgtgtgattgcattcttgatctcatccagattgtatccaagtgcgatcttcgctgcaaccttcgcgatcgggtatcctgttgctttggaagcaagtgcagaagaacggcttacacgagggtttacctcgattacacaatactcgaatgtctccgggtgtaatgcatactgtacgttacatccacctgtgatgttcagttcactgataatgttcagtgcggaagtacgaagcatctgatattctttatcacccagtgtctgagaaggagcgactacgatactgtctccagtatgaactccaaccgggtcaatattttccatattacatactgtaatacagtttcctgctccgtcacgcattacctcgtactcgatctctttccatcctgcgatacaacgttcaacaagaacctgaccaacacgggaaagacgaagaccattctcaaggatctctactaactgctgagaatcatgcgcgataccaccaccgcttcctcccagtgtataagcaggacgaagaacaaccgggtagccgatcttatttgcaaatgcaagtccgtcttctacattttctacaacaagagaagctgcaaccggctcaccgatcttctccattgttgccttgaattccaaacggtcctctgccttcttgattgtctcagatgttgttccgatcaggcgtacattattctcttttaagaatccagcctcttcgagttccattgcaaggttcagtccagcctgtcctccaagtgttggaagtacactgtctggtttttcctttttgatcagctgctcaacaacctcaattgtcagtggctcgatataaacacgatctgcgatatctttatctgtcatgattgttgcagggtttgagttgagaagtacaacctcaatcccttcttctttcagtgaacggcaggcctgagttccagcataatcgaactccgcagcctgtccgatgacgatcggaccagaaccgataactaatacttttttgatactattatctcttggcattatttctctcctcccatcatctcaagaaaacgatcgaacaggtatcctgaatcctgtggtcccgggcatgcttccggatggaactgaactgtaaaaatgttctttccaacatatgcaagtccttcgtttgttccgtcatttacattcttaaatgcaggaactgcaacgtttggatcaatcttgtcttcatcaacaacatagccgtgattctgtgaagaaatgtagactctgcctgtctgaagatctttcaccggatgatttcctccgcgatgtccgtattttaatttgtaagttgtaccacctgttgcaagtgccatcaactgatgtccaaggcaaatggcaaatattgggatatctgtttcataaagctttttgatttctttgataattgatgtacattctgccggatctccaggtccattggaaagcataatgccatctggattagatgcgatgatctcctccgctgttgtatcggccggataaacggtcacttcgcagccgcgatcatttaaagattttgcgatgtttttcttagctccgagatcaagaagtgcaaccttcttacctgttccttctaaaacgtatttctcctcacatgtaactttggagacaacaccttctaccttataattcttcaacttagagattacttcatcaagatcgtaattctcgtttgttgtgatcataccattcatggtacctttttctcttaaaatctttgtaagagcacgagtatcaactcccgcaatacccggaatatcatatttcttgaggaaatcctgaattgtaccttcacatctgaagttacttggcattctggataactccctcacaatatatccatctggccatgcctttaatgactccatatccggtgtaattccataattaccaatcagcggatatgtcataaccactgcctgtcccgcataagaagggtccgtcagtacctcaagatatcctgtcattgaagtattaaacacgatctcactgatcatatctctcgtcgaaccaatgcttgttcctgtaaacacagtaccgtcttccaaaataagaaacgctttcatctgttcaccctttcccttcgtaaaaatattttttctcaaaaggaaggcgctcatggagtctttattccagagcgccctctttctcaaattgtaaagattatactacagcatgagagacatttcaacatcatttttgatgaataacttagtacttttattaatatatattggtattttttacttataaatggtgttttatgcatttttatgaataccagaagatcattatgatccgctttctgtcatccacagcatacgtatatttcacctcttccaattgtctgaagtcaacaagaaactccgccgtctgtggaatcagattgtttataattgtcttttttgcaacctcataagcagcattttctgaaaagcggatagcaaacatttcctgtccctgttctatccctgctttcattttttcatagatttcattctcatcaaatgtttcatagtacagaccgtttattcgataatattccagatcattggaatcgcacaccggatacggcacaaaatcgtcttgctgatgatctgtaaaaatttcttcatctgtacaacatagatactcataattcacaagatcatgaggtagcgtttctcccgtctcattctcctgaaagatcggatctccgaaagtcacatccatctgataatacttatcatcacatttcactatattccatgcatgtgccccctgctcttttactgttcccacaacgtaaatacattctattcccatctgtttcaacagatattgcgctgccctggaatatcctgcgcagacggattttttcccaaccaaagaactataaatattctgattatccaatgcgttttgatcataatccaccgtatctacaagatatttgaaaatgtacttgatcttctcatactctgtcccacatccctgtgcacctgcaagtgcctcttgtgccgcattttcaatctgctcccgtctggattctctctgatccggtgtgcagatataagacggatgaaactcggtataatctttatataccgtcatttttgagctcccgtcacaccagaacaattccgaccggtcatacatcaggtattcgtatatctttccagcctcatcgttctcgcctgcgtgaagaagaatggtctcttccatggaacgaacaccctgcaggatctcacgataaatctgtttttcccgttccgtcagctgctgataataaaaaccatctgcaacatcttcttctgatacatttaactccggaaattctattttctgaccagaatcagacaaaaggacatttccagactcacgaaataatccgggtactgcttttgtcatctttaatacacctgccgctccgataatcacaagaagaagcacaagaaacacgaatccttttcttgttgtttttctatttcttcgtcgttttttccttcgtcttctgtctctttccattaatttcactgtctcctgtccgaactgatcctgtactttatgaaagctctgctattcttgacacgccaacataaatttccgatatcttataccatgttttataatctatctctcctgttaccggaagaccgaatatagattgaaatttccggacagccgcttctgtttcagatccatagattccatcttccgtcaatttgggaatctccggatatgcccccgcaatcacattcagttcttcctgtatctgacgcactttggggccttgtgaaccttgttccagtgtatatcccggccaggaggacggaatacctgagattgcttctgccgtattgatatacatatcgtcaccataataataccttagaatttcaatcggagaaaatccctgttctcccagactttttgacccccactgtgtcaaccaatttggacagctcaccctgcggccatcacaatactgtgtcaggattggctggcgcacattcggccgtgacagatagtctgcaaacagttcatccacaatcactgaaataggctcaaatatattgcgctccgggatccatttatggtcaaatgccgttgatgatgtaattgtaaaatcaaaccctttatttcgataccattccgtataaaccctgtttaaagtgaatgacataattgccagcacatttgcccttatggtgtctgccggccaggttgcatagatttcacttgatgcgacattttttatataatctttgtacttcacataataattctgtgctgtagaatcccgcggagatccatcatgtacgataatatattccggtacaaccacacggctcaagacaatttctcctgtttcatttaccggcttaatctcttcctctgcaatcttcggaggataatttccatataaagtatgagcagggatgacgaatacctgctcttcttccctgctctgatccttttgtttcatgcgtatattctggattgcctttgtgtttgccaggatctctgttcccgaaacactgatcgactcaaatccttctgcttcaatattcaatgtatattctgaatatggttgacgttcttcgttctcatccagactccattcttccggtggtgcattcagttcaaccagttctgtctgaccggaagaatccgtcaccacctgttctaatatactttccggaattcctgtataagagatggaaatccgtgcttcttttactggaaatgcattcacagaagatgtaacatttacctgcagctgaccacgatcgatcagattctcctgcgtttctttgctttcaattgaaccttgtatcggttgaaaaagtttcatagtttgtctcccacatctgattcgtttcctttttccagtatatgcggaaaactcctattctttcctgttttctacacaagtttcagaatgtcattaaacataataacaaccatcaatgccatcagaagcacaaatcctgcaaaatgtaccatgccttctttctcaggcggtactctttttccacgaacggcctcaatgataaggaatacaagacgtccaccgtccaacgccggaagcggtaacagattcatcacacccaggttggcggtcagaagtactcctatattgagaagatttaaaatcactactaccatgcctgccggagctgcttcctgataaacgttatctaccgcactgacaattccaaccggaccggaaagatcttttactcctacctttccaccaactaacattttcagactgtcaactgtatatgtgatccaatacttcaccgtatatgctccgtatcgaaccgttccaaacagacccggacgaaccatctcaccacctgtaattccaagcagaggaaaagcatctccctcattctgttttggttccagcacaactgtataatccttaccgtcacgctcatactcaacttctacactttttgttcccgcatgcatcatattatacagactgatatcgttccagatataaactgattttcctccgatcttcttgattacatctcccggttcgataccttcttcctgcgctgaatatccatctgtcacattactgacaatcggtgctcgatatcccgtccagccaataataatcatgcagaggatccatgcaagaataagattaaacactggacctgcaacaattactgacattcttgcccagaccgatttgctgttaaagctcccttcagacatatcatccacatcatcttcccccatcatgcaggctccgccaaacggaagaagctttaagctgaattttgtttctccaaactgttttccaaaaatagtcggtccaagacccagagagaattcatccacacggatcttattcttctttgcaagcagaaagtgtcctaattcgtgaaagattacaatcgcactgaatagcagaattgccaagattatgcccatacattaccacctgtttttaataaattcatatgtttcctgttctgtctttagtatctcctcaacggttggagccgcaatatttttatgcgcttccatacacgcctgaataatttcaggaatctggagatacttaatctttctgtcaaggaacagcgcaactgctttctcatttgccgcatttaatacagtcggaagggaacctcctgttcttcccgcttcaaaagcaagcttcaatccataaaatgtttccagatccggctgttcaaacgtgatctgctgaagtgtcgaaaagtccagtctgtcacccggaagataacgacgttccggataatagagtgcatactggattggaagtttcatatccggtgttccaagctgtgcgatcactgcaccatcttcatattccaccattgaatgaatgatactctgtggctgcacaacaacctgaatctgatctacatccactccaaagagccatttcgcctcaatcacttcaagacctttgttcaccattgtagatgagtcaattgtaatcttgcgtcccattgcccagtttggatgtttcaatgcatcctctacctggatgttcgccagatcttccagtctctttcctctaaatggtccaccggatgccgtcaggagaatcttgtgcagagccttctgctgtcctccctgaagagactggaagattgcgctgtgctcgctatccaccggaagaatagaaacccctttttcctttgccagcggcataatgatatgtcctgctgtgaccagtgtctctttatttgccaaagcaatatcttttcctgcattaattgcttcaattgtaggaagaattccaatcattccgacaattgctgtcacaagaatctctgactccggctgtctcgctacttcaagcagtccatccataccgcttactactttaacatccagatcatttattttgtcttttaattcatttgctctttcttctttccaaactgctgccagtttcggcttaaattctctgatctgtttctccaggagatcaatattattccctgctgcaagtgctgtaacctccagatcgccatttgtcctgacaatctccaatgtctgtgttcctatggatcctgtggatcccaaaattgcaattttcttcatcgtaactttttacctctattctgcttttatgttacaatccacaaaactgtggatcagcaacgcatctatcacacatatatctccttttacagaaacagggaaagatagaaaataataggtgctgtaaagataacactgtcaaaacggtcaagaattcctccatgtcccggaatcagttttccataatctttaatgttgtggtatctcttgatcgcagaagctgccaggtccccaatctgtgaaattgctccaccgaccgcaccgataatcgcatattccaatatatctgctgccgcatttccccagtaattaattgcaagtccatacaatactccgatcaatgctgcaccaaggattcctccgattccaccttctattgatttcttcggacttaaaatcggtgccagcttgtgctttccgatcaacataccgacacagtatgcacaagtatcacatccccaggagcatacaaatacaagccataccgagaagattcctcccggaagatttcttgtctgataaatgtaagagagcatcactgccacatagaacattccaaaaaaaccggcaaaaatctgctgtgtattatatttcggataggcaaatacaagaaccgccatctggcagatcaaaaaagccataaacagcataacaaaccagtttaaggattctcccggaagaagcggtttaaaatataataacccataatacaggattgcaaaaatatatccgacaattcctggtgccttcttctctatgtgaaatactttatacaactctgtcattccgatcaggctgattaataacaaaactgcaaagagcaggtttccgcccgtgatcactgtgacaagcgcgatgatcactaatagtattccacttagtaaccttgttttaaacatctttattccgcctcctctactccgccgaatcttctatgcctgcggttatattcttccaccgcttttataagctcttctttcgtaaatgccggccacggaatatctgtaaaataaaactctgaataggccagctgccaaagcagataattcgataatctttgttctccgcttgtacggatcatcaaatctggatccggaatgtcatttgtatccagataagaattaaataatgattcatcgatcgtgtccggatttaccttgccggccgcacaatccttcgcaagctttctggctgctcttgtgatctcatcacggcttccataattcagggcaattgtaaaattaagccctccattgttggctgttgcctcttccagttctctgatccggctcttgatatcctcatccagcggttcaatatcgccgatcacacggatcttcatatcattctttgccgctgtcttcagacatgttttcatgtaatttcttaaaagtttcatcagtgcatccacttcattctgtggtctgctccagttttctgtagaaaatgcatagactgtcaggtacttgattcccatacgccatgcttcttcacagatcttctcaacgttcttggctccctgtgcgtgtccgtaatttctcggcattccttttgattttgcccagcgtccgtttccatctaaaataatcgcaatatgctgtggtacgttcattttcttatcctctctgtcgcaactttctttaaagaagaaatggaggccttaaataagcctccatgttcttaaaaacttatctgcgtacaaataatctgtaaacagtttttccacattacaatctgacaattcagctctgctgtttttcgatttagactgtcatgatttccttggacttcgcctctaccatcttgtcaatcttagcaacatacttgtctgtgatcttctgaagttcatcttcaagatctttgatctcatcttcagaaatttccgttcctttcagtttcttgaaagcaacatttccatcacgacggacattacgtacagcaactttcgcttcctcaccttttttcttaacatctttcgcaagttcttttctgcgatcctctgtcagttctgggaataccagacggatagatgttccatcatttgtcgggttgattccgatatcagatgtaagaattgctttctcaattgccttgagcatgctcttctcccatggctggatctggatcatacgtgcttccggtacagatacattcgctacctgctggatcggtgttggtgttccgtagtaatcaactgccagcttatccagtacatgtgggtttgcacgccctgcacggattgtagcaagttctccatccagattgttaattgtctttgtcatcttatcatcatagattttgtttttttcattcatgctgtaattcctccgctatttaaaatagtttatacagtaacttttgttcctgtgaattttccctgcattgtatttacaatactattctcttcattaagtccgaatacaagcatcggcatcttattctcaagacagagaatggatgctgtcagatcaactgctgcgagtttctgatcgatcacttcttgaatagaaatttcatcatacttcactgctgccggattcaccttcggatcagtgtcatagataccgtcaattgcctttgcaagaagcattgcatctgcctcaatctcgattgcacggagaactgcacctgtatctgttgagaaatatggatgtcctgttccacctgcgaaaaagatcaccttgccttcttccagtgctgcaactgctgcatcctttgagaacagagatgtaaatgctccgcatacaaaaggtgtgaatacttctgtcttcattcctacatgacggaaaatatctgacacatagatacagttcataactgttgcaagcataccgatctgatctgcttttgtacggtcaattgtctcacttgttcttcctctccagaagtttcctcctcctgttacgattgctacctgcacaccttcatctacaagctgttttacctgcttcgcaactccgatacaagttgcctcatcaaatccagtcttcttctcgcctgcaagagcttctccgctcagctttaacaatactcttttcataccgtatagctcctttaaattctatctttcagtgcctgttctgtctttttcacacaaaccataattcaaagtataatggcactaacctaacttagagtataacataagtttccacatttgtcatgaccgaagcgtgaaatccttatttttttcaaaaaaagaaccgatttctttcaggcaatgtttctatacgaaaaatcctgatgaaatcgattcttttcatgattattaaattcgcctacataataagcattgaaaacagcactgtaataattccacagattccgattgcaagaccgctcattgcaccctcgatctcaccaatttcaattgcctttgatgttccgactgcatgactacatgcaccgatcgcaagtcctgctgccacagaatccttcacatggaatattttgatcagcgtcggagccagaatacttccaaggatccccgtgaaaataacagcaaccaccgtaatcggcactacaccacctgccggctcagaaatactcactgcgataggtgttgtcactgacttagggatcagtgaaactgtcatgctctgatccagtccaaataatttgcacattccaaacacgcttgccatagatgctgctgaccctgcagtacatccaactacaattggaagccaatatttcttcaaaacatcaatttttgtataaattgcaaccgcaagacatgctgttgccggagcaagaaacatattgatcaaagccccgcccacatcatagctatcatatggaatatcaaaaatcaaaaggactcctacaatcaatacaatcgcaacgatcagcggattacagatcggtgtctttaatttactatgcagcttttctcctatccagaatgctaccacactcaaccctactccaaaataaggagatgccattaattctttcatgctttctttcctccctttttcttctccatcaatttcactgtcagcgtaactacatacgctgtcacagcaaatgttacaatcgtggatacaacacagattacaagaagctgaagtactgtactttttaaaatgtcaaaataattaatgatacttactcctgccggtacaaaaaagaatgccatatttcctaataagaaatctgctttttcctgcacatgctcaatctttaagaacccggtcagcagacagatcaacaataaaatcataccgattacactcgccggaaaagaaaacggcagataatgttcgattacaagactgatccagcaaacaccgaatatcacaccaaactgttttaaaatcttcatttgttttacctctttttaatatgtaagcctacatgtcaagttccagaaacgattctttcgtcagtttctgtcaatctcatgccaggagaactctctcttcacatgacacgctttttagattagcactgcgcattctatccgtcaatgtgattattcatgaaataatcacactattttgcatgtttttttgatatatttcttcaaataatccaaaagacattgacatctaattgtatatgttttatgatacatatgttttcgcactttaaacaactaaaattttacagtacgaatattaaggaggatgataaaaaatgattattgttttgaaacctcatacttctgaggaaaatatacatcgtgtcgaaaatcttgtaaaaaagcacggacttgacactcatctggttcagggaaccggaatgacgatcatcggatgtatcggagatacaacactgatcgatccaagacaatttgaaattgacacatgtgttgacaaagttatgcatgtacaggagccttataagcttgcaaatcgcgcatttcatccggaagactctattatagatgtttccggtgttaagatcggcggtgaacatttaggactgattgcaggaccttgttctgtagaatcctatgagcaggttcttgagattgctcaaaaagcaaaaacatccggagcaaatcttctccgcggcggcgcattcaagccaagaacaagtccttacgctttccagggactcggacttgagggacttgatattctctgtgcagtcagagaagaagtcggacttcctattgtcacagaactcatgtcttccaagtatctggatgtattcaacgagaaggttgacctgatccagattggtgcccgcaacatgcagaactttgatcttctcaaagaattaggacaggttgatcgcccaatcctgttaaagagaggactgaatgccacatacgaagaatggatcatgtccgctgagtatatcatggcatccggtaatgaaaatgtcattctctgtgaacgtggtatccgtacttttgagacttttacaagaaacactctggatcttcagtgtatccctgttcttcgcagcaagacacatcttccaattattattgacccaagtcatgccggcggaaaatggtggcttgttgagcctatggcaaaggctgcagttgctgcaggtgctgacggacttatgattgaagttcacaacaatccggaagctgccctttgtgacggagcacaatctttgaaacctgagaaatatgatgttctgcttcagcaagttcgtcaaattgccgaagtagtcggtaaaaaattctaaggagatcgtcatgaaattaacagttgatcttggatcgaattcttatccgatccatattgaaaatggaatccttgcaaaaaccggagaacttgtaagcgaagtgttctccggaaaaaaaatcatgatcgtttcagatgataatgtttttcctctctatggaaaaattatcacaaaagcattgtctgactcaggatttgaatgccactcttttgttctgcctcacggcgaacctactaagagtttccagtctctgcctaagatctatgaagcattaataaatgcaaaactaacacgaagtgacctgctcatcgcacttggtggcggtgtgatcggtgatcttgccggatttgctgccagcagttatctgcgtggaatcaaatttgtacagattccaacctcactcctcgcacaggttgattcctctgttggtggaaaagttgcggtagatcttccacagggaaaaaatcttgttggtgcattttatcacccaaaggcagtcatcattgacccagatgtgctaaatacattgccagatcatttcatcagtgatggaatgggcgaagtgatcaaatatggatgcatcaaagacaaagagctttttgagcttttatgtagacatacttccttcgatgatttaaagtcgaagctgacacagattattgcacgctgcgttgatatcaaaagaatcgttgtcgaagccgatcagtttgaccttggagaacgtatccttctgaactttggacacacacttgcgcacacgattgaacagcacttcaattatgagcgcgaaagccatggagaggctgttggaatcggtatgtatcagatcacaaagattgcagaagagaaaggattaaccacatccggatgcgcagaacagatcaaaaaggcattggagatttataaacttccggacaactctaatttaccgattgatgtactgactgatgcaatttctttggataaaaagaacctgaataatcacttgaatgttgtacttcttcatgacattggagacagctatgtatatccaacagatgtcagcttctttgacggtgccggtattgtataacagaaatactttatgaacaaagaatgtgccttggcacattcttgcgcctgcggcggtcgcttgcgacacctaccttgtacgccgcagtgcgcatcctgagcggagcgttttttatatattaggaaaggactttcctaatatataaaaaacaggatccgccagttttatctttactgacagatcctgttttctattttctgttaaattaatccataatgcttcatggcatatgcaattccatcattttccactgtctttgtaacaaactcggcatatggatccaataccgaatcatgtctgcccatcgcaatcgcatgctccgcatattcaaacatcgccagatcattactgctgtctccgaagacatacgcatgacttgcatccatgtcatatttttccataataaactgacatgctgtcgctttagaaaatcccttctgaattacctcataggcctttccgccacggtcaagtgcttccatgtcatctccaagatactcacgaaaagaatcaaaatcgctcttatcatctacgtaaacaaataacttatcatattcaaatctttcgctctctaaagactgttcgattcctattcctctagatgcaaaatatcttcttgtagattctaacctgtcaaatcgtgatatgtgccctggaaaataacaatcctcttgtccttccgcaataacaccaagattacattcttttgcttttcgcagcagttctatacctctctgcttctcaatcgagctttttagcaaaacttcatcatgttctgtaagatatgtcccacagccacataaatacccatcaaattggaattttctcacctctgtcggaatactacagattgttctgcctgtattaataaacagcagatgtccttccgctcgtgctttttccattgcctcaatcgcactttgcggtacctcttttgtcacttcactcaacactgttccatcaatatcaaaaaacaagattgctctttccattttacttaatcctaactcttatctattcttaaacatttctactatgtcaaccatctcctgagacggattggagattacagcagtttgtataactttacacggtgcattatttttcacttcatcaaccgctgctgttactgctgatacactgccacctacaaaaacaagtgcatgtccaccacactttgtgtcctgtgtcacatactctacttctgcagtctttaacatgcggtcaactacgatcaccgcattggattctccttttacctctaccaggccatatgctccatatttcttcatcttatttccctttcttttccttctctgatttcctcacaaaacaatactcttctcatatgtacaacagacaattgaacaaatacctatttattaattgtcattgcaattgctttttccgtatcctcagaaggtgatgcaatcaccgtatgggaaacaatcttcgtcaacggtctggctacatccagtgctgcttccattgcagccttcacgtcagagacacttcctctcatcttcacacaggctcctgccgcaagacgatttctctccacaccctgaatctttactgctgctgcttttgctgccgcatcaagtgctacaaaacagatacactcactttccagttcaaatacgccgattgcctggtttctgtaatcctctgccatatctttctcctcttctttctgctgttctgatcttccaacagtttttgcatatcatatagctttattataatacacacctggcacttaatcaactacaacaacaattaaaattcatcaaaaaacaacatgaagaagttgctttcttgtggttttgttactattttgtaactttataagctgataacagtcttaattccacattcatttaacttcttcatgattcattactttcttctattttaaaatctgtctgttattttgcagactccacattcacagccccaaggttcattttgcggaaaactacaacaagtacttttccaagtgccagaacgagaattgccgccgcgattgcttccggaataccggatgctgtcacagttcccatcaccagaccgaatactgctgtaagtgcaacttcttttgcctcggcatactgctgtgcaaacaggaaatagatgcttcccattacagtgacagtattcaccattgaaccaacaaatcccacaatcggaagtgcaataaactgattcagtttaatctttgtaaaaagtacccacagccatcctgctgccacaccgatcagaattctgcatccaacggaaatccagattgccttcaacgctccaggaattcctgttgtacttaaaaatggtgaaaatgcaaaggataagagtgtcggagccattgtattactgaccagagagcatataccaaaaactgctccaagaattgctcctgcaccaggtcctaacagaattgctccgaggatcaccggaatatgaactgttgttgccttaatgatagggagctggatcataccaagcggtgtattggccagtacgatcacgattgctgccataagtgcaacactaaccatccaacgagtgtcatgtttctttgttttcattattcaattcctccttgttatcattcccaacttgcgggatacaatacaattaccggattagtatatcattcctctgcctgatcaacaagtataaaaagaaatacaatttcatatattctattaacgattttccgaggtgaacgaatgaaactctctctttcccggaaatgtatccattttcccatacacccttttaaatcaaagaaatattgcattttatttcttgttttctcttatttttcaggtattggagctggatttcttaaagaacagattttcgctttttctaatgagtcaacttcggctcgcccctctccagtcaaccagaactccgtgacttctattccccggacgatttcctgtgcccttcctgatctcacactttcttcagaaggaaactgggggttaagttttcaggaagaaggcaaaactcctgttggaaatgcttcgatccaggaacttgcatctatggatgcttattacgcacaggatacgtctgaaaaagttctgtatcttacttttgatgccggttacgaaaacggaaatacacctgccatccttgatgcactgaaaaaacatcaggtaaaagccactttttttgttgtcggaacctacattgactctgagcctgaactgatccgacagataataaaagaaggacacaccgtgggaaaccatacctggcatcaccccgacatgtcccatatttcttctatagaagatttccaaaaagaactggaatatgtagaaactgcctataaaaacgtaaccggaaagaatatgaccaaatactatcggcctcctcagggaaaatacagtgaagctaatcttcaaatggcaaaagaacttggttacaaaagtttcttctggagtctcgcctatgtagactggtatcaggataaccagccatccaaagaagaagctttctccaaactcctcggaaggattcatcccggagctatcgttctgctccacagcacatcttccactaatgctgaaatcctggatgaactactgaccagatgggaagagatgggataccatgtacagccccttgaaaatatcatttccacttcatctactactgtccagcaacacacgtaactataaattttcaaccgctgctttctcgattgcaagacccttagcatatgtttccataaatttctcgtatccttccacatcttccgcaaccggatccattcctgttcccactgcatcatggaatactttgttctcaagataatctgtcagcgattccttgtcctctttcttaataaggtaatcggcaagcagtgcgattccccatgcaccaccttcacctgctgtctccataacataaaccggtgtatcgattgctcctgcaaggattctctgtccaacaccttttgtcttaaacaatccgccatgtcccatcattcgatccaatgcaacatgttcttttttcagaaggatattcattcctgtcttcaatgctccaagagaagtataaagatgcactctcataaagtttgcaagattaaatttgctgtcaggtttgcgaacgaataacggtcttccttcgttaaatcctgtaatatgctctcctgagaaatagttgtaagccagaagtccgccacaatcggaatctccttctaatgctttgttataaagtgttccaaaaatctggttcatatctgctgtcattcccatactctctgcaaattcacggaacagattcacccatgcattcagatctgatgtacagttattacagtgtaccatcgctacaagatctccggccggagttgttacgaggtcaatttcttcgtaaggctttgtcaagtctttctcaagtactgccattgcaaatacacttgttccggcagatacatttcctgtacggacagcaacgctgtttgttgcaaccattcctgttccggcatctccttccggaggacacattggaattccggactgaagtgttcctgtaggatcaagcagttttgtgccttcttctgtcaatacacctgcgtcttctccggcaacaagaacttccggaaggatttcacggatcttccatgggaaattcttctctgctgtaagttcatcaaactgatccatcatcttctcattaaatttcttagtagctatgtcgattgggaacattcctgctgcatcaccatttccgagcaccttcttgccggtcagtttccaatggatatatcctgcaagtgttgtaatataacgaacatcttttacatgttcttcaccatttaagattgcctggtacagatgagcaatactccaacgctgcggaatatgataagaaaagagctctgtcagtttttcagaagcttcttctgtgatcgtatttctccaggtacggaacggaacaagcaattcatcattctcatcaaacgcaagatatccatgcatcattgcgctgactccgagtgctgcaaatttcgtaagcttcacattatattttgcttctacatctttcacaagatcctggtaacatccctgaagaccattcttgattttctccatgctgtatgtccagatgttgtctacaagctgattctcccagtcataacttccggatgcgatcggacttttatcctcatcaattaaaactgctttgattcttgtagaaccaaactcaattccaagcaccgcttttccttcttcgattgttttcttaatctcttcttttcctctcatatttttgccctcctataaaaaatgcgacgtataactcatttaagtaagtcatcgccgcatccgattttataacatatgttttctaagctcttctccgctctttgcgcttaagtatgcaggtgcaatatcaaatactgtcttgcatccgctctgtccttcgcttgccagtctgtaagctgctcttgcataagcgatcagtacagatgatgtaaattccggattggaatccagtttcagactatattcgatcaggtgcttattctcaccatcccatcctgtctttccgctgcggagtacaaatccaccgtgcggaattccgctgtggtttgctttcagttcttcttcactgataaagtgtactgttgtatcataatctgagaagtagttcggcattgtcttgatctcttcttctaccttcgccgcatctgctccttcttccagtacaacgaaacactctcttgtatgtttctgtcttgttgtaagttccggattctctccgtttcttactgctttcagtgcagcctctaccggaattgtgtactgctttccgtctttgacaccttcaactctgcggattgcatcagaatgtccctggcttacacctttgccccagaatgtgtaatcatttccatccggaagaatcgcattcgcatacagtctattcagggagaacattcccggatcccagcccacggagatgattcctacatgtccgccttcttttgcggctgcatctacatttgcaaaatgctccgggattcttgcatgtgtatcaaaactatcgattacattgaacatctttgcgtaaacaggtgtctgttttggaaggtctgttgcacttcctccgcaaattatcataacgtcaatcttatctttccagtcttctacgtctgctacattacaaactgtcgcagtctctgtcagaatcttgacatcttccggatttcttcttgtgaacactgccacaagctccatgtcatcattctgctttactgcgcactcaacgcctcttccaagattaccataacctaaaataccaattttaatactcatacttaaactcctttttgctccgcagatctgtctgctttgcattttcttagcggacagatttacggagactttttttctaattagatattataccttttcgttttcttcatttcaatgaattttcgataaatttttaagtattgaaggttatcctcttaatgattttttattttctaaatgcaagttcattccatctgagttcatttttcagattacggattgttgtatctttatcaatatatacagcttcgattcccatcattgctgcccagtcacccatctgttctgcagtgatatcataagagaatgctgtatgatgtgcaccaccgcaaagaatccaggcttcagctcctgttgcgagatccggctccggtgtccagaagtttgttgctaccggaagtttcggcattggtttttcatttttcttacaatcaactgtattgatgatcagacggaaacggtctccaagatcgatcagtgatgttgcgataccttttccttcttttgatgtaaatacaagtcttgcaggatcttctctgtctcccatagaaagtggatttaccttgatgctgatcggaccatctgcgatagatgggcagatctcaagcatatgagcctgaaggattccttcttttccaggcacaaaattatatgtataatcttccagcatcgatgttccttttgcatctttcatgccttctgtcatgatcttcatgatacgaaccatagctgctgtcttccagtctccttcagctccaaatccatatcccttctgcatcagacgctggattgcaagtcccggaagctgtttgagtgcaccgagatctccaaaatgtgtaacgattgcctgatagtttttctcctcaaggaaacgctcgaatccaagctcaatctgtgcctgaacagcaacatgttttctgaactcttccggatctcttccttcaagaaggatctcatatttgtcataatactcttctactaatgtatttacatctgctgcgcttacagcatctacagactctgcgatctcatttaccggataagcatctacttcccatccgaatttaatctgtgcctctactttgtcaccttcagtaacagcaacatttctcatgttgtctgcaactctcatgacacgtacatggctgctttcgatcacaccaactgctgtacgcatccaggaagcgatcttctcctgaaccttctcgtctgaccagtgtccaacaacaacttttctctcgattccaagtcttgtgaaaatgtgtccgaactcacgtccaccatgcgctgactggttctcattcatgaaatccatatcgatcgtgtcatatgggatctccatattgaactgtgtatgaaggtgaagcagtggttttctgaactcctgaagtccaagaatccatgattttgcaggtgagaatgtatgcatccatgtaatgacaccggcacattcatcatcaatattagcttcattaaaagtcttacggatcagttcgtttgtgatcaatgttggtttccatacaacttcatatggaagaactccagactcattgagcttctctacgataatcttggcatgctctgctacatgcgccagacattcatctccgtaaagatcctgtgaacctgtgcaaaaccagaatttgtactctttcttctttagcatttttgtgtcctccttgtaataaaatgttcatagttattttttatttatcacttaatttgttactgtgttatacttgacagttattattttgctgtattctgtccgtaataggcattcgcaccatgttttctatagtaatgcttatcctgaagttcctgcggagccggttttacctgcggattgatcatctcacatcttgctgccatcttcgccacttcttctgcaacaactgcattgtgaactgcttcgtgtgcatctttcccccatgtaaatacaccatgattcttacaaagaactgctggaactgcaatataatctttcttcttagcttcaaactcatctgcaatcagaactcctgtgttcttctcatatgcttcctcgatctcttctttcgtcagattacgtacacatgggatttctccataaatgtaatctgcatgtgttgttccataacatggaatatctcttcctgcctgtgcccagcttgttgcccatgcagaatgtgtatgtacaacaccaccgatttttggaaaacgattataaagaacaacatgtgtcggtgtatcggaagatgggttgtaacgtccctctactttatttccattcagatcaacaactaccatatcttccggagtcagcttatcatattcaactccacttggtttaataacaaaaagtccgctttctcgatcgattccacttacatttccccatgtaaatgtaaccagatcatattttggaagcagcatatttgcctcgtaaacctcttttttcaactgttctaacattattcttctcctttcgtctgctgtctacatgacttcattatataatttcacagaatttcgcatcacaagttccggcgcaaattccgctgagtacatttccatatttttatcaatcttatccaatataatctgtgctgcacactttccaatctcattcgccggattattcaccgatgtgatcggtacttcacaaaatcttgcaagactggaattgtcaattccaataacggaaatctgatctgggactttgacttccgcactttgcagtaccttgaccagtttacttgcaatctcatcattgtaacagacacaggccgtacatccatctaaacgtttcaggactctgtcactttccatctccatttcccggatatcttccgaatcaacccataaaatctgacgatttttaatcttaagtgaatgctccatgagtgcctttgtgtatcctgcatatcgcattcttccctgcccgtcatccgccttgaagattccggcgattcttgtatgtccacattctaaaagatgttttgttgcaagatatccagctttctcatcatctagactgacatgtggaattgtgagattctcatagaaactattcacaaacacaaccggtattcctgatttctgtaatttctgatataaatctaaattcggattcggaagcccactttttacaggctctgcaatcaaaccatcaattcttcttgttctcaaaaattcttccagatgcatccgctcctttgctacagaattgtctgtcattgcaatttgaagtattccgcctgcctgtgttacctttttttcaatttcccggataataacaggaaaaatataggtatcgatatacgtcagcattactgcgattcgtttttcttcatgatctgctcttctttctgtatttccaagaaggattcccgcatcttcacatatataagagccacttccgcgtctgctttccacaatattctcttttactaattcttccaatgcccgtcgtaccgtctgacgactgacctggaattgttcagatagttcctgttctgaaggaagcttctctccggaaaccattcttcccgacctgacttcctcctgaatccaggttacaattttttcaaattttttcattcgcccgtgacctctccatacaattaaccataattaccgttatcacttacagtgttctgattatcattgctctgatcagtactttttcttcatgtacttaatatacaacaatacatgtcacaatacaattcgcagtatacccaatctttttcttctgttttttatgtaataatatataaaaataagaagttgtattgtttttctatttatttttcaatacagcttcttataattttaaacctgatttaaattttttctccttttgcttcaaattttcctcttgcatttttcactttttcggttcataatagcatcagacaaagaactaaatattgtcaaaggggagctggtcagaaccggctgagaggagacgtgttaccgtttcgacccgtttaaacctgatttggataatgccaacggagggaattgataccatgtaatgattgagatgcccttgcatctctttttacttcggacagctggtaggatcttcactcaggtgaggatccttttttacatttaaaaggagactcaagttatgaaacagacaacaaacacaaaaaaactggcacttgcaggtgttctcaccgctcttgccatcgttggaagctttttaagctttcctgtagccggaagtaaatgtgcaccggttcaacatatggtaaatatctttgcagccgtacttcttggtcccggctggggcgttggaattgcattctgtgcaagccttctgcgcaatatacttggaatcggaagtctgatggctttcccgggtagtatgatcggagctctctgctgtggacttgtttacaaaaaatgtaagaatttaagccttacttgtcttgcagaagcacttggaacaggtattctcggaggaattgctgcttatccggttgctttattccttatgggagcagcaccggcaggattatttatctatgtgatcccattcctgatctcaacagtagccggaagtatcttggcattcctgctgatttcagtattccagaaaagtggagtaatggcacagctttttccgacttcttaatccgtaactgcaaaatttccgaacagttacatgcgatacattgggggcaccaccttgtaccgcacaagaaaatgcagaatcaatctgtaatcaccggagtattccattaataactttcttattttacagtcattaatacatctccgttgaaggcgtcagcataatcttatactcattcgctggtagtgtagctaaacagttacgttcctttccgcatctattcatatgcatggaaccgtagcttttcttgtgtacgctgtccgtgttttgctgacgtcaaaaattatataattcacgtatacgaatggaggcaaaacaacatgagaaactacacaacccagatagatgcagctcgtaaagggattctcaccccagaaatcaaaacagtagctgaaaaagagcatatggacactgacaaactgatgaagcttgtcgcagaaggaaaggttgcaatctgtgctaacaagaatcataaagccctgaacccggaaggtgtcggaagcatgctccgcacaaagatcaatgtcaaccttggagtttcccgtgactgcaaggattatgatattgaaatgcagaaagtaatgagcgcagtagaacttggagccgaatctatcatggatctttccagccatggagatacacagccgttccgtcgcaaactgacttctgaatgtcctgctatgatcggtacagttcctgtatacgacagtgtcattcattatcagagagatcttgctactctgactgcacaggatttccttgatgtcatccgtatgcatgcagaagacggtgttgacttcgttacacttcactgcggaatcacaagaaaaacaattgaacagatcaaaaagcataaacgtaaaatgaacatcgtaagccgtggaggaagtcttgtattcgcatggatgagcatgacaggagaagagaacccattctacgagtactatgatgagattcttgatatctgcgaagaatatgacgtgacaatctcacttggtgatgcgtgccgtcctggatgtctggctgacgctacagacgtatgccagattgaagagcttgtgcgtctcggtgagctaacaaaacgtgcctgggatcataatgttcaggttatggtagaaggacctggacatgtaccgcttgatcaggttgcagctaacatgaaagtgcagcagaccatctgtatgggagctcctttctatgtacttggacctatcgttacagatattgctcctggatatgaccatatcacttccgcgatcggtggagctgttgcagcaatgaacggtgcttccttcctctgctatgtaacaccagctgaacaccttgctcttccaaatgttgaagatacaaaacagggaatcattgcttctaagattgcagctcatgctgctgatattgccaaaggaattcctggagcaagagatatcgatgataagatggcagatgcccgccgtgttcttgactgggatgcacagtttgaatgcgctctggatcctgaaactgcaaaagcaatccgcgacagcagaaaaccggaggacgaccacagcgatacttgtagtatgtgtggaaaattctgtgcagtaagaagcatgaataaagcactggccggggagtatattgatattctgtaagtatccgaaatacatatagcatttggggagattaattccaagcagttataattaagggaaagcggttaaagaatcgctttcccttttgtatttacgcaagcaacgagccaaagtccgaaatcaattgtccgtatgcatctggttttcccttaattgcctttttgacaattcggatttcctcttttttgtccactcttcctcttcctcctttcgtaaacaacaacatatataatttcacgtcaacccgtcctttgttatgtttacatttattagacggaaattttattaaaaaggttacaaaaatctccggctacatttctgcaaccagagcactttaataattcacatctatctataattgttgtaatcaatagctttttatttttcttacctctagttatttccaatatgtctccagatatttctttgcttcttccattgaaagctcatattctctctgaacattattaagagtatcctcctctgaaacatttaaattccgacacgttctaataactgctgctattccacgttctacacctttctgaattccatctttcactccatcatcatacatttcctgtattgccttacacatatcaatcatctcctccttatgttctgcttcacctggtatttgtttcatgtttagaaaagctttcatcgcctggcttgtttcataatcaacgttctgaaaaaactttttattctcgttaatgtaatccgttaattcttccttactgtccctatatcttagcatagttagtatcacttgtaaatcattcgaaaatttttcaacatcttccaatcgttctgcatcaacaagattgattttatagttcggaagatatttctccaaaatttcgttctcttctttcgtaccctccaactgaaacatatcatacagatcaacaggtccatcccacggctctgaaccatagtaaaagactaatgaaataatcggtatcaatcgatctttttttcgaaatcgggacaaatactctcctggtttcttattcttttgttattttgtaactcatcaaaatggaatctcctgctgatacagccttgaatatgagataaagttatcctttcgataacacattcagacaaatgaaatatagaaaatatatgtctgagattttgatgtgaattaactataacaaaatcattagaaggtgtcaattagaaaaacagttgcaacatttacgaaaaaagctatcggttacaacacatttcatcttaattgttgtaatcgatagcttttaatatttctatattatcttattccggatccacaatcttcccggcaactgcacatgccgctgctgttctcggacttgcaagataaatctctaccttagatgttcccatacgtccaaggaagtttctgttattcgttgctacaactcgttctccgtcagaaaggattcctcctgttcttccgcagcacagtccgcaccccggatgtgtaatgatcgcacctgcttctgccaaaatatccagcgttccgtctgccagtgcctgtctgtagatcttgcggcttgccggtgtaacgatcagcttcacaaagtctgcaactttcttccctttgagtacttctgccgcagctctaagatcttccagacgtccgtttgtacaggatccgataaatacctggtcaatctctgttccttccagttcactgacatttctgatcttatcaacctgggacggacatgccataaccggaacgaaatcctctgccttatatgtcattgtcttcatatagacagcatcttcatctccaacaaggcttttctggtagtcgttgagttcaatctcacaatattctgccgtcttctcatccggtgtgaaaagagcacattttgctcctgcctcgattgccatgtttgccattgtcatacggcttgcaactgacatattctcaatcgtgcttcccgagaattccagtgctctgtaagttgctccgtccgcacggagatctccgatcagtcgaagaatgatatccttggacattacattttccggaagttctccatcaatcacaactttgattgtctccggaactttgatccacattgtaccggtcccgagaatacttgccatttctgtataaccgattccggatgaaaatgcgccgacacaaccataagttgtcgtatggctgtctgttccgaatgcgatatctccaggtttcacatatccggcttctgtcatcagctggtgacagattccgtcgcttctatgtacgtgagtcagtccatatttttctacaaattcatctcctttgtggaaatgtcttgtgtcatcctgctggcttgccggaaccaggtggtcataaatcaaaaccactttatccggatcatgaagttttgtaaatcccatctcttcaaatttatctgctacaaaaggaatgaaaatatcatggatcatgcatctgtccacattgactgtcacgatatctcccggctttactgcctttcctgtattatgtctgataatcttttcaataatcgtctcgcccatcatgctctcctttctgctcaatcctcaagtccattcagcttgcgcatagcttttacaagtccgcctgcctgaatgatgctcatcagattctccggcagagaagcgatcggatattctttgccattataatctacatgctgattcatcacgacatcaattgtgtcgccttctttcatatcatcatacagatccggctgctcgatcaaaagcagaccattgttgattgaattgcggaaaaagattcttgcaaatgattttgcgatcacacactggattccaagtgctttgatgatctccggtgcctgctctctggaagatccacacccaaagttctttcctgcaacaataatatcacctttctggatctgtcctgccagctccggacgaagcggactgaatccatactgtttcatatcgtcaattgttttcagtgcaagatactctgtcgggatgatgatatcagtatcaatatcatctccgagcacccacacctttcctgtaaatttatccatagttcacctcaaaatatataagttcttctctgtgtaagctacctcttgtttctttcactttacagatcagatgcaagtgtgatctcgcccttaattgctgatgctgtaactgttgctgcggatccaagatacacttttgaacttgggtgtcctgcacgacccttaaaattacgtgttcctgtactgatcagaacttcattttcaccgataactccctggcagcttccccagcagacactacagttcggattcatcacaattgcgcctgcctccatgaaaatgtcaagaagtccttccttaagagcctggcggtaaattgtctggcttgccggaacaacaaggaaacgaaccttatctgcaactttctttcctttgatgacttctgctccgacacgaagatcttcaatacgtccattattacaggaacctaaaaatgcttcatcaatcttaattccacgcacttcctttgccggacttaaattatctacaaaatcaggttttgccacgaccggttccactttagaaagatcgattgtatactctctgatataatgcgcatccggatcactgtggaatacagctttcggctcacggccatgctctttcaggtattccattgctttttcatctgcctcaaagatacctgtcttggctccggcttctactgccatgttgcaaagtgcgatacgatcactgatgctcagtgtctttgctccttctcctgtgaactccatcacctgatagttacatccgttcgcaccaacctgaccgataattgtcaggatcagatctcttgcataaacgccttccggaagttctccaatcagattgaatttcactgattctggaacgagtacccaggactgtcctgtcaccattccataaaggaagtctgtacatccgacacctgtaccgaacgctccgagtgctccgtaagaacaagtatggctgtcagctccgaagatcagttctcctggacggacatagttctccatcataacctgatggcagacaccctttccttcccagaagtcaattccgttctcttttgcaaaatctctcattttcttctgagatgccgctgtcttcggactgtctgacggcacattatgatccacaataaataccagtttcttcggatctgcaatacgaggattctttaatttgttattatacatatccacagtaagatgtgtcgttccatcattactcatcattctgtccaatgttactgtatggatatctcccggttttacgctgtccacaccggctgcagcagcgatgatcttctctgcgattgtcattcccatagttctagtcctccttattcagtgaagcgatcagtccgccctgattcagaatgttctgcatatactccggcagctttgtacaggaataagtctttccattcgcctcagctgttccgtcagacatgcgaagttccattgtatcacctgtcttcacctcatccggaagctccttacagacaatgaccggaagtccgatattgattgcatttctatagaagattcttgcaaatgatttcgcaatgacagcctgtactccaagtgctttgagcacacccggtgcctgctctctggaggatccacaaccaaaattctctcctccgactacgaaatctcccgattttacttttttcgcaaaatccggatccaatgattcaaatgtatggctcttcatctcatctaagttcggcagaagcagatactgggatgcgatgatctgatctgtatcaagatcattatgaaatttaaaaattgtacctttttccataataataatgtcctttctgttgtcctgtggataaattgtatcaatttaacgtgatgaagtccatgaactattttaacaaatcttcatcttattttgcattgattttctatatcatacttccacttcgaatggcagaagatctaaaatatctttctgcacatcgattccaggatatacttctatcaatttcagtcccttcggtgtcaggcgaaatacacagcgttcagtcacataaagtaccttctgtccatttgcgatcgcacgtctggcagaaaaactaatactcttgactcgatctacaaattttgaaatagaaccttccttctcaatttcaacaatccccttcttctgtgaaacttccagtccttttgctgtaaaactgaaacagaatacaacggttggtgtcttagctgtgatattcgcaaatcctccgattccggcaaacgctcccggtccacggtgtgcattcacatttccttctttatccacttcaagcgcgcccataaagcagacatcgaggccaccattatcataaaggtcaaactggtttgccatatcataaacagatgccgcaccgatcattgctccaaatgcttctcctgaaaccggaaatcctccgattcctccggactcaaccgtcaatgtcaccatatcaagcattccactctttcttgcaaaacgagaaaccatctccggaatgccgattccaatatttacaatatcatctacacgtaattccttcgatgcacgttttccgatgatatttgccaccgtactgttctttgactgtttcactgagacagaatctaaacgctcactccatgtgttccactcttcatatggaatctcaaagcttccagtcagtgctgtataggcttcatttcttgcttccggttctgccacaacgatcgcatctaccagacatcccggaataattgcatttctcggtcgtgacggggtgtccaccaggcggtctacctgtacgatcaccttgccgcgattcgcttttactgcctggcaaatagacagcgcatcaccggacataaacatatcgtcaaaagtaatatttccctttcggtctgctgctgttcctttaatcagtgcaatattaattttcggtaatttataatagagaaattcctctccatccacttccacatgcctgaccagtgaatcatcaattgaaattctgttaattccgggcccttcttttcttggatctacaaatatatccaagccaacctttgaaagtgcacccgggagacctccggcctgtgcacggattgcatgtgaaatgcatccaagcggaagattgtatgcctcaaaccggtcttctaaaaccagtttctttgtactgagcattgctccaaaatgcccgcagataagcttgtccacagcgccctctctgatgtatccttctgcattatgttcatcatcccagacaccaaaaccggcactagaaatcattgtcagatgtgttggggactgcatcttctggtatcttctgtaaattgcttcgtgaagttctattggattctctattccgacaaatgaattcacacagatacagtctccgtcccgaatcagccggattgcttcatcggcagtcattatttcatacatggtgtattttctcctagttctctaaaatatctttagaatacattatacactatcttcggagatcaatcattacaaatcatacaattattttccatttgtctcattattccaaccatttggttactcaattccatgtaaaatcattaaaagtgcaaaaaacgagacaaacctgttcacactatttgcaggagggattagaactatgccaaaacgaacacctactaccggagaaaagaatctgatcggcaaaaggctcattgaacttcgtcggcaacaccatatgtcacagagacttttagcttacaaactccaattgcgcggatatgatatggacaaaaatgtaattacacgaatagaaaccaacaaacgttacgttacagacatagaattgaaagctctaactgagatcttcgacgtttcttatgaatatctcattgagggaaaagacatccttgaaccttaacggatgatagaaacggaggtgaaactatggcaaatattcaacttgcggataatctacggcgtttgagaaagcaatataactacacacaggctcagatcggcaaaaagctgcatatcactcatcaggcttattcaaattatgaaaccggtgtacgtgaaccaaaccttcaacttcttgctgaactatcctggatctatcacacctctgtcgactcgcttatcactcagtactgcaatgcaaagaatccatcatcagttgaagtaaaaaactatttctgtattaaaattgaaaatagtgaaaacgacattcttcttacaaaaaatgaagtgaatttacttttgaaataccgttctgctggagaagctgaacgtaaacttgcacatgaagctttagattttactgaacgttgatttctatttcaaaaagaactgaacccattgacattaattatctgggttcagttcttttttatctctactttcttctacgctgatattgcatttcctgtatacagctgataatacttacctttctcttcaatcaactggtcgtgtgtacctctctcgataatccttccctgttcaagtaccatgatacagtcagaattacgaactgttgacaaacggtgtgcgatcacaaaggtagtacgcccatgcatcagccggtccatactttcctggataatacgctctgtgcgagtatcgattgaacttgttgcctcatccagaatcaataccggtggatctgctactgccgcacgggcaatcgcaagaagctgtcgctgtccctgacttaagtttgctccatctccggtgatcaccgtgtcatatccttccggaagtctgcggataaatccatctgcatttgccagctttgccgctgcaatgatttcttcatctgttgcatccagctttccaaaacgaatattatctttcactgtaccagtaaacaaatgtgtatcctgcaatacgattccaagagaatgtcgaagatctgctttcttgatcttgttaatattaattccgtcatagcggatcttaccatcctgaatatcgtagaaacgattgatcagatttgtaattgtcgtcttaccggctcctgttgaacctacgaaagcaatcttctgccccggttctgcatatagcttcacatcatgaaggacgattttgtcatcattgtatccgaaatccactccgtcaaatacaacatttccttttaactcaacataatcaacagaaccatctgcctgatgtgtatgtttccatgcccagcggccagtacgtttctcactttctgtcagttttccattctcttctttcgcattaactaatgtaacataaccttcatccacttccattttttcatccagaagtgtaaagatacgctccgcacctgcgagtgccataacaatcgcattcagctgctggctcacctggttgatcggcatactgaagcttttattaaatgtaagaaaacttgccagaccgcccaatgtaaatccaccgacatggttaagagcaagtgcacctccaacgattgcacacattacataactgatatttccaatctgcgcattcataggaccgaggaagtttgcataagtatttgcacggtctgcgcttacaaacagatcctcattcaactttttgaattctgtcttactttcttcttcatgacagaataccttcacaaccttctggccgttcatcatttcttcaatatatccgttgaccttaccaagattcttctgctgctcaaggaaatattttccactctgtccggcagctttctttgttccccagatcatgatcgcaaccataaccatcgtcactgctgtcagtggaatattcaagatcagcatactgataaatacactgacaattgtaaatccactgttgataatctgcggaatactctggcttaccatctgtctgagtgtatcaatgtcattcgtgtagattgacataatatcaccatgcgcatgtgtatcgaaatatttaatcggaagtttctccatgtgactgaacagatcatttctcatgttcatcatcattccctgtgtcacattgatcataattcggttataagtataagttgccacaattccgactccataaaaacaagcaacttttccgattgcatgtgcaagcggtgtaaagttcggtgtatcactggacaataagaacggtgtaatgtatttatcaatcaaatctcttgtgaacattgttccctgaacatttgcaataactcctacaaaaataaggatgaatactataatgcaatgaaatttataatcccggaaaatataatccatcagacgtttaagtaatttcccaggattttccactctattctttggttttcccattggtccgcgcattatgcttcacctccattttcatcaaaatctccgcctccctgtgtctgagactcatatacctcgcgataaatctcatctgacacaagcagttcatcatgtgttccgaatccatgaatctttccttcatccatcacaataatacggtctgcatcctgaacactggatacacgctgtgcaatgatcagctttgtcgtatccggaatctcttcacggaatgcacgtctgatcttcgcatctgttgcagtatcaacagcacttgtactgtcatcaagaatcaggatcttcggcttctttagcaatgctcttgcaatacagagtctctgcttctgaccaccggacacattgtttccgccctgttcaatatgcgtattatatttatccgggaagcgctcgataaattcatctgcacaggccagtttacatgcctggatacactcttcatctgtcgcttctttgtctccccaacggagattgtctaaaatacttcctgtaaataagacatttttctgaagcactacagacacctggttacggagcacctcaagatcatattcttttacattttttccaccaaccagaatctctccgtccgtgacgtcatacagacggctgatcagattgaccagacttgtcttcgcacttccggttcctccgataattccaatcgtttctccggaacgaatctccagattgatgtctttgagaaccttctctgcactgtctttcttataagaaaagtctacatttttaaatgtaatgcttccgtctgcgacttcatataccggatgctctggattgtgaatatctgttttttcattcagcacttccgcaatacggcgcatacttgccatactcatggaaatcatgacgaaaaccatcgaaagcatcataagactcataagaatattcatacaataggcaagaagactcatcagttctccggttgtaagagaatccacaacaatcatctttgcaccaaaccagctgattaaaatgatacaggtataaactgtaaacatcatgatcggcgcattccagataacattcttctctgcttttacaaaaatatcataaatattcttacttgcgcgtttgaatttacttgtctcttcctcttctcttacatatgcctttacaacacggattgcagaaacattttcctgaacagactcattcaatgcgtcatatttcggaaatgcctgttggaaatatgcagttgcatgacggataataaaaaacaaaataattccaagaatcaagactgccacaagataaatacttgccagccttgcattgattgcaagtgccatcaccatcgcacataccatacttgccggtgctctcatcatcatacgtaacatcatctgatacgcattctgcacatttgttacatctgttgtcagacgcgttaccagtcctgctgtactgaaatgatcaatatttgcaaacgaatatgtctgaatccgatcaaacattgcatttctcaaattctttgcgaaacctgtagaagcctttgctccataacgtcctcccgccattccggcaagcaggcctaaaaatgctgctacgatcatgattccacccactttataaatgtggtggatatcacccgtattaacccctttatcaatgatcgatgccatcaaaaacgggatcaatgtctcaaataaaacttcaagaatcatgaaaatcggtgtcgcgatcgatgctgtcttatactcttttacttcttttaataaagtacgaatcatgaattctctcctctcatttttcttagattgagatgaaccttatgagtcactctcaaaaatgcctgtaattcttcttcggtaattccttcttccagttctgcgtccattcgcttgaaaatctctccaagcttttcgtgactttcgcgtcctgcctctgtcagcataacctttttcaaccttgcatcactcgcaaccgaagcacgacagacaagtcctttcttctctaaagcctgaatgatattcgttactcccgaacggcagattccgaaatacttctctatgtctttctgataaatctctgcatcctgatgttcatagagataacgcaaaatccatccatgcataagggttacttcatccaacccttccgcttttactctcgcctcaagtaattttgaaatggaacgatccattttatgtacctgtggaccgatatgaaaatgttcttcacacaaaattgtaatcctcctttctatcttcacacgcaggaactgtttaccagtgaattgttcatttgtgaacagttcccacataaacaagtttatcacattggtttttaatgtcaatagaaaatattgagttgtcttctatttttattttgcaaaagaaaagctcacagctgatcatatacaaccagccgtgaactttttattctaagtttcataatatgaatctatatttacattctatctctcagcacatgatacaactctgcctctgtataatactgatacggatttacataaaggaaagttaagattccaaacgtacatgcccccagcaaatgccagccgataaaggaaagatccagcacaaacgcatcccatttattccccatcatcattcgtttgctctccgcaaaaatctcctgtctgctcatctccggatggtcgagcagaagatacggtaccattgcatattcatatcctttgatcacaccgggaacaataaataacagtgaccacaatgtaagataaattgttttcagaagcatcgtcatacgtactgtcttattgcaatctcttaccatacggaaaatatctttcacatcctgtcttccgtctcttccatttttgaaaaatttacaacagccgacagtcattggattccataggaaataggcaatagccagatatacaataaatgaaattacaaccacaactgctacagttgctgcaatcccaaacattaggatcggatgaaaaccttgtatcgaagtttccacctcactattcttattttttagtacattataagaatgcgtaaatccatttcccaaaagaaatgtataaatcaatgctgcaagaacagaataccaataattctgtttcaacaggaactttgctcttccctttaattcacttcttgtccacaacataaaaatccctcctgatgtcattctgttgatcgaactgattgctacataatcattatagcatatttcatcttccagaaatatctcaagagggatatttttcttaatttgtaactgttcagagccaagcaaaatttcaaaaatagatgtaaaatgcttgcatttttaagacggtttttgaaattttatttggcggatacgccacaccttcaaaatgcgtagcattttgaaggttggctctgaacagtcaccttaatcttttgatatctacatgccatccggatactctactccttccggtagtggatcccagtcattcaatcccaatgactgtttatatctggcacgatccaatgtcagtatttccacaggctcattcagataatccatgagctctttgataccttcccgcgtcttattatttacttcgaaaatgcgctcacatccggcattcttcatccaaagtctcaccatatcaacatttgcgtacggtgaatcaatctttgtaatgattccgatcaatggacgttggataaaacatctgcttccaggtccgaacagattgaacggttcatctgcagcctgcaccatagcaatcacgtctgcctcaaatgaaaaacaggcaagtccaacactgaaatgcttagactctgcatactctcccggagagtcgatcgtatcatcttctgtattcgtatactgtgtcttcacataatgcagttcttctcccttaagagcctgcgtcagtgaagtcttccccgcttcacttctccccatcaaaaatatctttttcatcctgttacgcctctgtcttcttaacttctatgaacctcgcacactgcaaagccaagtctctcattaaaaaatcgaactacttcttccaccgctgtctgtacctgtgtcaatccgccggtcagaatcagtgtcccgcagaatctgtccataaatccaatctcaacatctgcgctcttgaatgctacatctgcagcaaccacaactgcttcccacggtgtaaaacgcagaagtccgatagactctcctgtgtgatcctcaccttcatgagttccaatatgtaatcccagattctggtaaataacctcatctgatctactgataatatgcgccatgcagacttccttccccggcacgcgcacacgagtcatacgaagcttctttcctttcagattctcatagtcatcatgaaacagacgctccatgagctcttctctcgttatacgttcccgttccataagcgcacttcctatcgttttgtaatatcacagactacataaccaagagaatctctgaaataatccacaacttctgtcaatgcagatgtaacatcagaaatctctcctgtaataatcagtgtgcctgtaaaacggtctgcgaatccaagataaacattaccgcttttcactgcaatatcagatgcgataactgctgactccggtggagtcatattcataattccaattgcagaagaacgataatccagatgtggatttaatccgagtttctgataaataatcggagccggacctcccattacatgtgcaaatgtaatctccttacctgcaactgtttcctgtacaattctaatctgttctccgtgatcattcgccatctgtcagttcctctctttcacatagattctgtaattctcattcatacaatcctgtatgttaatccactaacattctctgttcacagccagtctcgttactgttcacacgatgtgaccagcaacacatctcgccattttaaatcgcctttggcgatggggcgagatgcattcaagccaaaacatgcatcctccgtgtcaatcagcgaagtgattgacacgggagtgaacagtaacccagtctcagctataaactctcttactataaataatactatctatatgcctttctgtcaaggagattccaataaatctcaacacgctttaattaagaatcaacaaaatccaactgttttatttgtaaaaacaacaaaaactcaagtttcttttttatacataagaaaaaagggaagtttttcacctgcaatacacatacacacttcatgtaatttctgcaaatgaaaaactcccctttattttaactattaacttctatcaatttacacttcttctgcaatctctcttgctacgaacacaccacttgctgatgcgtgggacaatgaatgtgtcactccacttccgtctccaatcacatacaggcccttgtgttttgtttcaagatgttcatccagtttcacttccatattgtagaacttaacttctacaccatagagcagtgtatcatcatttgctgttccaggtgcgatcttatccaaagcgtagatcatctcaatgattccatcaagaatacgtttcggcaatacaaggctcaaatctcccggttctgcggaaagtgtcggtgtcagaaaactctctgcaatacgtgccggtgtacttcttcttcctcggatcagatcaccaaagcgctgtacaagaacgccacctccaagcatattagacaggcgtgcaatactttcaccatatccattactgtctttgaacggctctgaaaaatgtttctccacaagaagcgcaaagtttgtattctctgtctgcttcgccggatcttcatagctatgtccgtttactgtaacgattccgtttgtattctcatttacaacgattccattcggattcatacagaatgttctgactttatcttcaaacttctctgttctgtagacaatcttgctttcatacagttcatctgtaagatgtgagaaaataactgctggaagttccacacggactccgatatctacacgattggattttgttgtgatatcgagattttcacatactttttccatccatttacttccgcttcttcccacagaaacgatacatttcttacattcatctacaccatcttttgtaatcacgcgatatccgccgtcaatcgcttccacatcatctacatgacagttaaaacggaactctacagtatctttcaactttgcatagagattctcaagaacgacatagttgatatctgttccaagatgacgaacagatgcatccaaaagattcagcttattctgcatacaaagtttcttaatatgtgttcctgatgtggaatacatttttgtaccctcaccaccaaatttcacattgatctcatctacgtaattcatcagctcaattgctgtctctttaccgatatactcatacaatgttccaccaaaattatttgtgatattgtattttccatctgaaaatgctcctgctccaccgaatccactcataatcgcgcatgtcttgcagttcacacagctcttaatcttctttccatcgattgggcattttctcttctccagtggattgccggcttcaaataccgccaccttcaattccggcgctttctctgccagctcataagctgcaaagattcccccaggtcctgcaccgataataattacatcataattgctcatatatttttctcctttcaattactttcttgtttcttaactacactactcttcgtctcttaatttcaagattccgacaatcagcgtcttcatatcatcaaaaatataatcaaacgcaccggcctgacacatatttataatgaccataccaaccggaacagcaaggatcatccagatcacaccaccaattcgatatccaatataaatcaaaagcagtgtaaccagcggattcaatccgacactgtctccgacaagcttcggctggatcagctgtctgacgatttgcgtaattgcatagatcacaacaagcataatcgcacgtttataatctcccataaagactgcatatatagcccatggaatcatcgcagttcctgttccaaaaaatggtaggaaatctagaaatgcgatcaaaaatgcagacaatacaaagtaatggactctcaaaaatccaagtcctacagccaaaatcaaaaatacaattcccatgatcttaaactgtgccttgaaatatccaccaaccgcatatttcaggttatctatcaccatgatcattcgttcagttactgactttggcgcaatctgtttgacccatgtcacaacttcttctcgctctgagataaagaaataagaagacataaccataacgattgttgataccagataacttggcacacgctttgcgatatttcctgcggcacttaccgttggctcactgatttttgacatcagatttcccatcgtgtcatccaaattcgcaacagttgtcgtccatccattctggattccatccggcagtttgctaaaaattccggacatagaaattccaatttgatggagtcctttttcgagctgcacatacatttccggaaagtctttgaccagactgctgacttctgaaaccagccaactgacagcaaagtagcccagcgtccccatcaacgccaggactccgataataatcaatgcggagcctaatttttttctgatcttcaaacgtttttctaaccagttaacaaccggtgtggcgatggatgcaatgatccatccaaccacaaacggcatgagaaatccaagtaatttccatccgatcagtacaaatccaactgttgctactatgctgaaaagcaagcttacggcaacttgccagtatgggcgcttatttgtcatcctctgccccctcgtcatttccatatccgagatattctttctcaatcaattcccaaatctcatctcttccctgttttgtctgggatgagaatggaattacttttgttccaggaacaagctgcagacctgtcttcaacattttaatatgcttctgtacctgactgcgtttaatcttatcaagctttgttgcgataatgattggctgatatccctgatccaggatccactgatacatcattttatcattcgcagatggatcatgacggatatcgatcaaaaggaatactgccttaagctgttttgatgtatgcagataacgctcgatcagttttccccactgaatcttttcctgctcagaaacctttgcgtatccataccctgggagatcgaccagatacatttcctcattaatcgtatagaaattgattgtctgtgtctttcccggtgttgctgaaattcttgcataagacttacggttcatcagtgcattaatcagtgatgattttcctacatttgattttcccgcaaatgcgatctcaggcttatcgttttccggaagaacgcttgtgattccacaaactgtttccagatttatatttttaatgaccatgtcgtttactcctcctttcattctattttattgcaatctgctgtcagaagcaatctttttatcttgtcagtgctttctttaagacttcttccattgtctcaaccggaatgatttccaatccttttgtaatttcagaagaaagttcttccacatctgctgtgttctcttttggaataagcacggtctgtattcctgcatttttagcagcaagaagtttttctttcaatcctccaatcggaagtacacgacctctcaaggtgatttctcctgtcattgcgagatctgcgcgaactttcttgcctgtcacagcagaaagcattgctgttgccattgtgattccggctgatggtccgtctttcggaactgcaccttccggaatatgcacatgaatatcatgcttctcgaagaaatcttctgcgattgcatattttttgcttacagatcgaatataactgattccggcacgggcggactctttcattacatctccaagctgtcctgtcagcatgatctctcccttacccggcattacattcacctcaatctgaagcgtatctcctccgacacttgtccatgcaagtccacgtacgataccgacctccggtgctgcatttgccatctgataagaatatttctcttttccaaggaatttatgaagatttctatctgtcacagtaatcttctctttctcggttgtaagaagctcttttgccgctttacggcaaatatttccgatttcacgttctaactgacgaacacctgcttctttcgtatagttatgtgcgattttccagattgctttcttgctaaagctgagctgttcgtctgtaatcccatgcttttccagctgctttggaatcagatgttctattgcaatatgaagtttctcgttttctgtataacttgtaatctcgatgatctccattctgtccaggagtggtcttggaatcgtctgtaaggtattcgctgttgtgataaatgtaacctctgacagatccagtggcacttccagataatgatcgcggaacttactgttctgctcactgtccagtacttccaaaagtgcagagaacgtatcccctttatagtctgtacttactttgtcaatctcatccagaaggagtaccggattcttcacacctgctgtgcgaattccatttgcaattcttcctggcattgcccctacataagtcttgcggtgaccgcgaatctcagcttcgtcacgtactcctcctaaagaaatgcgcacaaacggtttcttaagagaacgagccaaagacttcgcaatagaagttttacctgttcccggaggtcccaccagacaaaggataggactttcccccttctgtgtcagtgttctgacagccaggaattccaggattctttctttcacctgttccaatccataatgatctgcctctaaaacttctttcgcatagttaatatctgtattatcttctgcacgtttattccacggcatctccaggattgtctcaatataagtacggattactccattttctgcctgagaaccgatcgtgttcttaaaccgtccaatttccttatggagcttttcttttacttcttccggtgcatctaatttgctacatgcttcttcgaactcatctgcatctgaaaatgtagtatcttcacctaattcctcgcgaatcaccttcagctgttctcttaaaagatattctttttgatgcttatctactttgctctttacttttctctgaagttcttctttgatttccatgatctgcatctcattcacaagcttcaatgataatttctcatatctgctccagaaatccagctcttccagaagttcctgttgatccttgtacttcaatggaatattcgcagccacttcatttaccagacgttttaaatcagtaatatcaagaatttctgcaacagattctttggaaatctttccattctttgctgcatattctgtaataatttccttcaatccgcgcatcattgcttccgcattcagatcatccggaatcgtgatctcctgttcttccagaacttctacttctgcacgaagataaggatctgtctcttcaattttcttaagaaccgcacgattctttccttccacgagaacccttacaactttctttgacagcttgatcagctgcttcacagatgcaactgttccagtctcatagacatcatcctgtccggggttctctgtctctattgatttctgggcaaccagaaatatctcctgctcttcaaccattgcctgttgaattgcagcgatggagcgttctctgctcacatcaaaatgaacgatcatctccggcatgattgttaatcctcttaaggcaaccatagggagacttcttgtctcgttgtccaattcaattcctcctcgttagaaaaggcgggtaggatggtactcccatcactcccgcctcgttttatactccgcaactgtttgcaggattcctgtatccagttactatttgctctcagatgtcaggaatgattttctttcctcactatcacgagtatacttcggttcttccactccaagaaccgcttccttcgtaatgcggcattccttgattgtcttatctgacggtactgtaaacatcgtatccatcatgatattctccatgattgcacggagacctctcgcacctgtcttacgcttcaatgttgtctctgctatttctaacagagcatctttatcaaattcaagcttcacgccatccaactccagaagcttctgatactgttttacgatcgcactttttggctctgtaagaatgcgtatcaatgcatccttatccagaagatccaatgatactgtcaccggaagtcttccgaccagctcagggatcaaaccaaactttacaagatcctgtggaagtgcttcctgaagaagtacatccatatcgtactcatgttttgatgcgatctctgcattgaatccgattgattttctatcgattcttgtctcaataatcttatcaattccttcaaaagcaccaccacagataaacaagatgttcgttgtatcaatctggatcaattcctgatgtggatgctttcttccgccctgcggtggaacagacgcaactgttccttcgatgattttcaaaagtgcctgctgaacaccttctccggaaacatctcgtgtgatggatggattttctgattttcttgtgatcttatcaatctcatcaatgtaaatgattccgtgttctgcacgctcgatgtctccgtctgctgcctgaatcaccttaaggagaatattttcaacgtcctctcctacatatccggcctctgtcagtgctgtagcatctgcgattgcaaatggaacattcaagactttcgcaagtgtctgtgccagaagtgtcttaccacatcctgttggtccaagcatcaggatattactcttctgaagttctactccaagatcctgttctgccagaattctcttataatgattgtaaactgcaacagaaagaactttcttcgcctcatcctgtccaatcacatattcgtccagaaaagctttcatctcttccggtgtcaggagattaatatcgtcaagtgcagctctgtcattaaaatctaattcttcctcaataatctcggtacaaatagcaacacagtcatcacagatataggttccgctcggtcctgcgatcatcttacgaacctgggactgtgtcttattacaaaacgagcatcttacgatatcctcagtcttttttcctgccatattctgtcacctcaataaccaattaatggtttactattacttcgtcgatcagaccgtactctttcgcctcttctgcagacatgaaattgtcacgctctgtatcctgctggatcacttccagcggctttcctgtatttgctgccaggatctcattcaatttcttctttgtacgaagaatatgttctgctgcaatctgaatctctgttgcctgtccctgtgcaccaccggatggctgatgaatcatgatttcagcgttcggaagggcaaatctctttcctttctttccaccggaaagcaggaatgcgcccatgctggctgccataccgatacatactgttgaaacatcacacttgatgtactgcattgtatcgtagattgccagacctgctgttacagatcctcccgggctgttaatatacagctggatatccttatccggatcgtctgcctccaagaacagaagctgtgcaacgatcacgcttgctgacacatcatttacttcttctccgaggaaaatgatacgctcctttaaaagtcttgaataaatatcataggaacgctctccgcggcttgtctgctcaatgacataaggtactaaactcatatgctatccttccttttctatatgattgtcgctatttgcaatagttattaccagcaacgcataattattgttctgatccttactcccgaatcagtcctcatcctctcacttcttatagaaagagaaaaggcacacctgatatacaggcgcaccctctcaagaaatctaataaatgattagccttctacagatgcatcaacgatcagagtaactgcatcctgtactgcaatatcctctttcatctgcttcttctcgttctcacccatgaactctttcagcttctcaacttccatcttgtaagactcagccatcttagctaactcttcatcaagacgctcatcagatacttcaatattctctgctgctacgattgcttcaagaacaagtcttgttctgattctcttctcagcctgtggcttaagctcttccatcatcttctcttctgagagacctgtgaactggaagtactgctctacgctgagtccctgctgcataatgcggcgtgcaaaatcatcagccatctgtttagcctgaaggtcaaccattggttctggaagatcgatctctgcattagcaactgcctgctctacagcctgatcttctttcttagcctttccttcgttctctttacgctctttgatctgggcctttacttctgctctgtaagcatcaagtgtctcagccttctcggaaacgtcagatgcgaactcatcatctacttccggaagctcttttgctctgattgcgtgtactgtgcatttgaatacagcttctttacccttcagatcttctgaatgataatcttctgggaatgtaaccttaacttctacttctttgtcgatctcagctccgatcagctgctcctcgaatcccggaatgaaagaaccagatccgattgtcagtggatagttctcaccttttccaccttcgaatgcaacaccgtcaacgaatccttcgaaatcaagtgtaacatcatctttatctgctacagctctgtctgtaacctcaacgattcttgcatgctgctcacgaaccttctcgatctcctcgtcaacttccttctgtgttactcttgtagagtatttgtcaactttaagtcctttgtactctccaagtttaacttccggtttaactgcaacttctgctgtgaagatgaatgattttcccttctcaagctgaacgatatcaattgtcggctgggaagcaatctcaagttcactctcatcatatgcttttgcatatgcctcagaaatcatgcggtttgctgcctcatcataaaatacttccggtccgtacatcttctcgatcatctgacgcggaacttttcctttacggaatcctgggaggctgattttgctgcgctcttttaagtaagctgcctgcagtgccttctctacttcttcagctgaaacttcgattgtcagctttgccatattatgctctaatttttctacctgtaaactcattttcttcctccttgtttataagcaaattctttacttatcgaacgaattaatttcttaaaagtatacattcgcagtcattgaaacagtatagcatataaagtctcatatttccagtgttttttccactttcctatatcttttacatgtttttttacatttttctgactactttttctaattttattcctcatatacaatagattctgctatttcagaagctttttcattgccaaaaagctgacggatcagttccagtgcgaatggtatcgctgttcccacaccacggcttgttgtgatatttccatctgtgacaaaggaacagaactttgcttctttacaattcaactgttcttccatccccggataacagcatgctgctttctctttcaacaatccaagtgctccgaatacagtcggagctgcacagattgctgcgattctctttcccttttcattgaacttgcaaagtaagtctgccagacctttatgctcttttagatgcagtgttcccggcatacctcccggaagtacaagaagttctgcgtcatcaaaaaatgctttctcaaacaattcatccgcttccacctgtattccatgtgctccgtcaatctgcagttttcccataacagaaactgcctctacaaccgctcctgctcttctcaaaagatccactacagttaaaccttctacttcttcaaaaccgtctgctaaaaatacaactactttcttcatccaatacttcctcgctttccgatgatatctcaacaatgattttattttaacgccaggataagttattcgtcaagatgatacatatctcgttattctaaagtattgactctactttaaaatttctatttttagtcaataaattgcctgcctcctcatctcaccgttgcctttttgcatttcacgtattatagtataactaatcaacatcaggaggatcctttaactatggaaatagaacgcaaatttttaatacaaaagcttgaaaaactgccattttctcctttcgattatccacacaaagagctggaacaaggctacttatgcactgctcctgtcgtaaggatacgcagagaggatgacgattatgttctcacctacaaatccaaagggcttatgacccgtgaagaatataaccttcctcttaccaaagaaagttatgagcatctaaaagaaaaagtcgacggacgcatcattcataaaacacgctatgtcattcctatgagttgtgtctgcccggaaaacgcagacttctgttccactccgctttttcttgaattagatatcttccatgatgaccttgctccactgattctcgccgaaattgaattcccggacgaagaaacagctaacacctatcccgcacctcaatggctgggagaggacgttacctttagttctgcgtaccataacagtacactgagccgtatgtaacacaagagccaggacagttaccatatatggtacctgctctggctctttctactatactttcagaatccaatgaagcaaatacaaattaatctgccatacggatcatcttcacaacttccggcatctcttctgccttctgtgcatactccgcctcggtcatctcgcctgtgataacagcgaattctccctcgacatcatctgctttgacaaatttaacttgtccgaacacttcgtccacacgggatttgagtacagattcttctccatgaattctgacgaagaatcttctcttcgcatccgcattcggaacaagttcgagtgtgttactctcccatcttgttacaacagttctgtgaaggtgctttgcagcatctacaacatctgcaactacagcacttgctgtcggaagcttacccgctccacttccgtagaacattgcatcaccaagcatatttccacgaacaaaaattgcattaaatacatcattcacattacacagcggatgattcttggaaagaagcatcggtgcaacgattgcagagaaagattccccttctcttttgctggatgcaagcagcttgattgccatatccatcgtcttggcatatttcatatcttctgttgtgatctttgtgattccttctgtatggattgtctcaaaatccacatgttgtcctgcgatcagagatgtcagaatcgcaatctttctacacgcatcatgtccctcgacatctgcttccggattacgctccgcgtatcctttctcctgcgcctctttgagcacctcatcataatcagcactctcaaagaacatctttgtcaacatatagtttgttgttccattcaggattcccgtcacttcgtcgattctatctgctgtcagagaggaattcagtgcacgaatgattgggatacccccaccaacacttgcttcaaacataaaattgatacttctgtcacgagcaatctcaagaagttctgctccatgttttgctaccagagctttgttggatgtagcaacgttcttacctgcttccagacaacgttttacaaatgtataagcaggctctatacctcccattgtctcaacaacaatgtctacttctgcatcatttacgattgtctcgaaatcatgtgtcagaatctcttctaccggatcacccggaaaatctctgagatccagaacgtattttacatttatcacatcctgagctctttcattgatgagttcaccattggttctgaggacctctacaactcctgatcctactgtaccgtatcccattactgctacatttatcattctgctttctttcctttctgtgcttctgcatccatgctcaaatatgcgttaataaaaggatcaatatttccatccattactgcacctacattgctgatttctgcgtttgttctgtgatccttgacaagtgtatatggctgcatgacataagaacggatctgatttccgaaattaatatctctaacctctccgcggatgtctgacatcttctctgcctgttcctgctgtttgagtacatacaatttggatttcaacatctgcatcgccttatctttattcatgtgctgggaacgttcattctgacactgaaccacaattcctgtcggaagatgtgtgattcggattgcagatgacgtcttattgatatgctgtccgccggcaccactggaacgataagtatcgacacggatatcatcgtcgttgatctcgatatcgatatcttcttcaatatccggaattacatcacaggatgcaaatgatgtctgtcgttttccatttgcattaaatggagaaatacgtaccagacgatgtacacctttctcggaacggagatagccataagcattttctcccttaacctcaaaagtaactcccttgatacctgctacatctccttccagatagtccagcacctcgacttcatatcctctcttttcagcccagcggctgtacatacgatagagcatacttgtccagtccattgcctctgtaccgcccgcacctgcgtgaagtgtcacgattgcattatctgcatcatacggtccgatcagaagtgtgctaattcgcagtttctcaaagacttcctcaaatgttccaagttcctcttcaatctcttctgcggcttcctgctcctcgtcttctcctgcactcatttcaatcagaagaagcatgtcttcataatctgtaaataatttttcaatctcttttacagaatcctgaagacctttcaattctttcattacatgctgggaaacctccgggtcatcccagaatcctggttcctccagtctcttttctaattcttcgatcctaagcttctttgaagcgaggtcaaagtgaatccctcaaatctttcagcggttcttcatatgcagtcagtcttgacttcagttcatccagtaaaaccaccttaatcacctctttcatatacatactttaaattattgtaactgttcagcttatttgttttttcttccacagcattgtttgtacttctttccacttccgcatgggcatggatcgtttggataaatcttcttctcctcgcgctttttcggtgcacggactgcgctgtcatctttgtttgttccagttacttttgcaacctcttctctctccactttctgctcaaccttaatgtggaataatgtacggatcgtgttttcagcgattgcatttgtcatttcaccgaacatctcatatcctgtcatcttgtactctaccagtggatctctctgcccataagcctgaagaccgattccctgacgcagctgatccatatcatcgatatgatccatccatcttgcatcaatcactttcagaagtacaacacgctcaacttcacgaagctgctctgcctccgggaactctgcttctttgttctcataagccttcactccacgttctttcagaagatgctttaactccttctgactcatactctggcattccttctcagatgggagctgaagctgtggaatcacattgtgaagattcacatccaatcctttgatatcccactcttccggatctgcctctgtagaagcgaaacgatctgtcatattttccacatattctgtaatcatgctgtagattgtatcacgcatgctttctccatcaagaacacggcgtctctcttcgtaaataatctctctctgctcgttcattacctgatcgtactccaacagattcttacgaataccaaagttattgctctcaatcttcttctgtgctttctcaattgcacttgaaagcatcttatgttcaatctgctcaccgtcttctacaccaagtgtattgaaaattcccatcagtctttctgaaccgaacagtcgcatcagatcatcttccagagaaatgtagaatctggactctcctggatctccctgacgtccagaacgtccccgcagctgattgtcaatacgacgggattcatgtctctctgtaccgataattttcaggccacctgccgcacgcgcatcatcatccagcttgatatcagtaccacggccagccatattggttgcgatcgttaccgctccatgaagtccggcatcggctacaattgcagcctcctgctcatgatactttgcattcagtacattatgcttgattccctctttcttcagcatcttgctgagaagttcggatacttcaattgtaattgtacctaccagcaccggctgtcctgttgcatgcgcttctttaacagcttctacaactgcttcgtatttttctttctttgtcttataaacagcatcctcaagatccactctctgtaccggcctgtttgtcggaatttcaacaacgtccattccataaatatcacggaactctttctcctctgtgatcgcagtacctgtcataccactcttcttgtcatacttattaaacaggttctggaatgtgattgttgccagagtcttactctctcttcttaccttcacatgttccttcgcctcgattgcctgatgcagaccatcagagtaacgacgtcccggcatgatacgtcctgtaaactcatcgacgatcataacttcaccatccggagttacaacataatcctgatcacggaacatcagattgtgtgctctgagtgcaaggataatattatgctgaatttccaggttctccggatcagcaaggttttcgatgtggaagaacttctctactttcttcacaccatcttctgtcaggttaactgtcttctctttctcatcaacaatgaaatcacctgtctcttcaatttcttctcccatgatggcattcatcttggaaaattcaccgcttgcctcacctcgctccagctgttttgcaagaacatcgcaggcttcatacaaagctgtagactttccactctgtccggaaataatcaaaggtgttctggcctcatcgatcaaaacggaatcgacctcatcgataactgcataatgcaatcctctctgaaccagctgttctttatagataaccatgttatctctcagataatcaaatccaagttcattattcgttacataagtaatatcgcaattataagcctctcgtctctcgtcattgttcatctcattgagaacaacaccgactttgagtcctaaaaactcatgtacttttcccatccactcagcatcacgctttgccagatagtcattaactgtgacgatgtgaacaccttttccgtccaaggcattcaaatatgccggaagtgtggacacaagtgtcttaccttcaccagttctcatctctgcgatacgtccctgatgcaagataataccaccaatcaactgtactctataatgacgcattccaagacttctgtaagcaccttctcttactacagcatatgcttccggaaggatatcatccagagtctctccctctttcagtcgttctttaaattcttttgtctttcctcgaagttcttcgtctgaaagcgcctccatctccggccccagtgcctcgatgcggtctacgatcggataaattcgttttagctcgttctcactgtgagttccgaaaatcttttctataatattcatatttccgcaattactccttctctgaattttgattttggtctgaaattccactctgttctacattctatcactatccgctcttgaattcaacaacttcatagagtgttaacattctgcggatttacaagcggagtgattaacacgggagtgaacagtaactacaaacttctgcatatggaattttcccgccaaacagatcaagagcgcttccgattgtaaagtctacttttccgccgctctcttttcgaaatctctccagatcttccattgatccgattccaccggcataagtgattgggattccgtcccagctcccaagcatccttactaattctgtttccattccggcacctttcccctccacatctacaccatgtatcaggaattcatcacaatattttgaaagatcatttaacacctcgtgagataatgcaagttctgtgaacttctgccagcggtctgtaaccacgtaaaatttaccatcttttcttctgcagctaagatctaaaaccacatgttctttcccaactgcagccaccagtttctgaagcctctcttcatgaaagattccgtcttgaaacacataagaagtcacgatcacatgacttgctcctgaatctagatattcctgtgcattatctgctgtaattccaccaccgatctgcattccacccgggtatgccgccagagctcccatcgcctgctttttcgtcgcctcgtagtattctgatccaactggatttaaaagaattatatggccgcctttcaggtgatctttctgatactgtcttgcataccatgctgcatccagttctgacgtaaagtttgtgctggcctgatttccttcatctttcaggcttccgcccacaatctgtttcacttttccattatgtatatcaatacatggtctgaatctcatcctgtctctccttcttttagaaaaatgccgcagttccgtttccggcctacggcatattgatcactcgttattctgcatcttgttctgcacgccattctcctgcgtcagatcatcggctgcatcatcgacaccatttgtgatatcgtctgtaacatcatccacgccatccgttacatcgtcaaccgcgtcatctaggatactatctccattctggtctcccgcattatttccggtattattaccattttctccacttccatcatagttttcaccggatgtcgcatcattgagattgtcattcgctgttcctgtgttgtttccacaaccagcgagactgcaaagcatcagtacgcacatcacacagacaagcaattttcttattctcctcatttttgtcttcctttcaaataaatattgtgtctttactatctgcaatttttcaatatttattcaaaagaaattttttacagttttgtcgctttgctgcgaagtttctccatcgctctggcttcaatctggcgtacgcgttctcttgtcacattcagttcatcaccgatttcttccaacgtatgtgtttttccatcttccagaccaaatctcaaacggatcacctgacgttctctatcattaagggactctaacaattcctgtacttcttctttttgcacaagctgattcatagcatcttccggcgtcgttgcatccttatcttcaaccatatcaccaagattattctccccatcttctcctaccggagtttccagtgaaaccggattctgaagatatgacaaaatctcttttacaaattccggtgatttatccttcatctcttctgctatctcttccggtgtagcctctcttccaaatttctgctgaagatcttttgaaattttctgtactttcttcatattctctgcaacatgaaccggcacacggatttctcgtgactgctgatcaattgcccgctgcattgcttctttgatccaccaggatgcatatgtggaaaatcgattttcctttgtataatcatatttctctgctgcatgcatgagaccaatatttccctcctggatcagatccatgagtgtaatccctcttccagtataatgttttgcgagagataccaccaggcgtagattcccctcttccagctttcttcttgcatcctcatctcctgaagcacttttacacccaaggtccctttcctcttcttctgacagcaaagggatctgtccaatctcattcagatagattttcagcggttctgttacttctgttccttccggaagatttaagtctttttccattctagtaatcctttctatcttcagtcctaattcaagaatgcctcggcattcttgctgcgaggtgcgcgtcatgcaattgcatgacatacttctactgcgcacctctgcaatcctgccggaggctatatcagcataaacaattatttacagtttttctataatctgaccatttctgtacgacgccagcagccattcaagatctttaatctgttcttttaatttccttccagcgtcggtgtcaccaacaagacgtctctcgttcactctggtcactactactgtctctgaatgaatgtcattttccttcttaattgctgcttctgtagactcaaatggttcatgtgctaccaaaagtaatccatacgaattataaaccagcgtgtatcctgcaattccggtttctttctgatatgctcttgaaaatcccccatcaataaccattactttaccattacacttgatcggactctcgccatcttttctcttaaccggcacatgaccatttacaatgtgtgtatcctcttttggatccaatccaaattctatcatgatattatccacaactgtctcattttcaagcagggcatagtatggatttttcttttctgtatgtgtttccttctctgcaaggaaatatctttcaaaggtcgccatcttgttctttccaaataacggtgaatccggatgtaaccagatataccacattatatcttttccatcttcccgctcctttggatccaatgcaaaaaatccttttctcacataactttccaacacatcatacaaggcctttccacgatatttctttccgaaaatttctacttctttcaggttccccttcgcatctaacggtacacatccatgatacaacagattattgttatataccttatacaaaccacctttcgcaagaaggaaacgcatatgttcctgtaatttttcacatcccacaaaagcatgcaccagacgatccataatttcttcctcttcagaagtcagtttatatgggttctttggatctattgtcgggaaatttgtatccaggagcttatattcttttccttccagattaatcgtacctttctgataatcaatcttatgcagtaacgcacgattctccagatggaatcctttctgcctctctataatctggccttctactttaaactgaataattgaaatcgctttatgtattctcagattcatctgcatctcatcagattccggtctgtcagtacctttcaatttaaaacaggtgcatggatcatccttgtacatcctcatagcaaatgtagccagtggaagcagattgataccataaccatcttctataatatccaggtttccatatctggcgcagatacggatcacatttgcaatgcagcccaactgtccggccgctgctcccatccatacaacatcatggtttccccactgaatatcaacagaatgatatttcagcagcttatccataataagatgcggtcccggtcctctgtcataaatatcaccgacaatatgcagatgatccacaaccagacgctggatcagttctgaaattgctgcaataaattcttctgcccggccgatcctgataatcgtagatataatttcattataataagactctttgtcactgacttccgctttctcggtaatcaattcttcgatcacataagagaaatccttcggcagtgattttctcactttagatcttgtatatttacttgctgcacgcttacttacttctatcagacgatacagattcactcgataccagtcatccatattcgactccgtccgcttcacctgttccatcttcgctttcggatagtaaatcaatgttgccagtgcttttttgtcctttacactcattgtattaccaaaaacatcttcaatcttgcttctcacggcaccagacccattcctcagaacatgagaaaaagcttcatcttctccatgtacatccgtcagaaaatgttctgtccccttcggaaggttcaaaattgcctgcagattaataatctccgtagatgcagctgcaattgtcggataaagatccgacagcctgtctaaataacggttttccatattttccatatacaatctcctccagacccgaaatcttccccttaccgggatctatttaccggatcttgttcccgccggtttaccggctattattcatccagtactaaaactgaataacatcccccatgtcatacatgccggctggctgtcccgcaaggaactttcctgcctcaactgcacctttggcaaatacgcttcttgaatatgcagtatgtttaaattcaatcacttcatctgttcctgcaaaaatcacctcatgttctcctacgattgttcctgcacgaactgctgaaataccaatttcctttgcgtctcgcttctttctcacctgacttctgtcatacacatactcgtattcatttcccattgcttcattaatagaatctgccaatgcaagtgccgttccgcttggcgcatccagcttctgattatggtgtttctcaacaagttcaatatcatagcctgccggtgcaagtactttggcagcatctttcaaaagtttcagtaataggttgattcccattgacatattcgcagacttaagaactgcaatcttctcagagcactcatctaccttctttaactgttcgtctgaaagccctgttgtacaaagaacaacaggaagactcttcttcacacagtaatctaacaattcatccactgctcccgcattggaaaaatcaatcactacatctacatccacatcacactgtgtgatctcctcaaatactggataatcatttggaattcctgtgaacttgtcgacacctgccgcaatcactgcatcttcttcattcttcacaatttctgtgatcatgcgtcccatttttccgttgcatccgtgcattaatatcttaaccatctgtatcttcctcctgtatgaaacctcaagtattccatgatttttcagaactactttctatcagcattacctgttttttctttcatcacactcttattttccgaaatatcatataaaaaagaatatcacatttgagttgttatctcaatatatgatatccttttcacaaagttttaaataatgaaacaatccacccttagaattcttccacacactccagtttactgacggagacctcatatgcgattcttgtctctgtttgtgtctctgacaatttcttcacatactctctgctttggattcttccgaatattctgacatgttcccctacatcaaagtttgaagcatatcttgcatttctcccccagcagatacatggaatataatcagattttccatacggtctgttcactgccagcagaatatctgcaatttctcttccaagaggtgtttttctgtagaccggacgcttacacatatatccttcaagaagtatatgatttgttcttgctccatccggttcttcctcgataaattctatttctctcgcaaacacagaaagaaccagtctgttttttgtctcctcatgacgattataggatctgaactgaccagacaccattaaatattctccacggcaatcctgtgttacgtcaatgagacgttctgatatcatgaccggaatccggtcacaagagttacttaaccgctttacaagaagttctaccatatagaaaccttctccaaagacctcatggctgtatgtaaactctgataccacctctcctataactgtcacctggttgttttcaataatcttatctgacataatttataattctcccttcctctggctggtattttaagtcattacctaatgtatgtcttattgtaatgaaatagaactattttttacagaaaaagtattcgacctttttcgtacttgaaatcgaattcaaactttttcttgtaaatttcattttttgtgataaaataatgaagttatgttacagataaatattttttgtataattaaggaagagtgtttagattatgaaaacaaaacgtgaagatgtgagaaatgttgcaattatcgcccatgttgaccatggtaagacaactctggttgacgagcttttaaaacagagcggtgtattccgtgagaatcaggaagtagaagaacgtgtcatggactctaatgacattgagcgtgaacgtggaattacaatcctttctaagaatactgccgttcattataatggtgttaagatcaatatcattgacacacctggacatgctgacttcggtggagaagtagaacgtgttcttaagatggtaaatggtgttgtacttgttgttgatgcatttgaaggtgctatgcctcagacaaaattcgttctgagaaaagcacttgagctggaacttcctgttatcgtatgtatcaataagattgaccgtccggaagcaagaccggatgccgtaattgatgaggttcttgaactctttatcgatcttggtgcttcagatgagcagcttgagtgtccttttgtatatgcttctgcaaaagctggtgttgctgtccttgatctctctgacgagaaacaggatatgaaaccactgttcgagacaatccttgactacattcctgctccggaaggtgatccggaagctccgacccagatgctgatcagcacgatcgactacaatgaatatgttggtcgtatcggagttggtaaagtagaaaacggtacaatttccgtgaaccaggatatggttgttgtaaaccatcatgatcctgacaaacagcagcgcgtaaaaattggtaaactctatgaattcgacggactgaaccgtgtagaagtaaaagaagctacaatcggatctattgttgctgtatcaggtatcacagatatttccatcggagatactctctgctctcctgagaatccggaagccattccgttccagaagatttctgagccaacaatctccatgcagtttatcgtaaacgacagcccgtttgcaggacaggaaggtaaattcgttacatcccgtcatctgcgtgaccgtcttttccgtgagctgaacacagatgtcagccttcgagtagaagagacagaaaatgcagacagcttcaaagtatccggtcgtggtgagcttcacctttctgttcttattgaaaacatgcgtcgtgaaggatacgagtttgcagtaagtaaagctgaagttctgtatcacacagatgaaaatggcaaaaaacttgagcctatggaacttgcttatattgatgtccctgatgagttcactggaattgttattgaaaaactcggtcagagaaaaggtgaactccgcaacatgactccgtcaaacggtggatatactcgtctcgaattccttatcccggcacgtggactgatcggataccgtggtgagttcatgacggatacaaaaggaaatggtatcatcaacacaagctttgaaggatatgcaccatacaaaggagatatccagtatcgtaagcagggatctctgatcgcatttgagactggtgaatccgtaacttatggtctgtacagtgcccaggagcgtggtactctcttcatcggagccggtgagaaagtatattccggtatggttatcggacagaatggtaaagctgaagatatcgaactgaacgtatgtaagacaaaacatcttactaacacacgttcttccagcgcagatgaagcacttcgtctgacacctccgcgtgttctcagcctcgaacaggcacttgactttattgataccgatgaacttcttgaagtaacaccggaaaatctgcgtatccgcaaaaagattctggattccagaatgagaaaacgcagcacgatcaataaataatattcgtgtttgaaacttatgctcgctgttcaaaatagcattcattaattatctgataattttaaaatcgtcctaaagttttgaaaattttcataattttaggacgatttattgtatacagaaaatctttttcatgttataatataaccatgatacagaagtaatctaatcattcttctgtataatttgaacaaaggagttgagcagcatgaaatttattatcagcggaaaaaacatcgaggtaacaccgggattaaaggatgctatcgaacagaaattaggaaaacttgaaaggtacttcactcctgaaacagaaatcaatgtaacgctcagtgtagaaaaaggacgtcagaaaattgaggtaacaatcccagtgaagggaaatattatccgttctgagcagacaagcaatgatatgtatgtttccattgatcttgtagaagagatcatcgaacgccagcttcgcaaatataagaacaaactggttgctcgtaatcagggacatcctacatcatatgctccatcaggtaacagcttcagaaaagaattctttgattcagaagaagagacaacagaagacgatgaagtccgtatcgttcgtacaaagaagtttggtattaaaccaatgtttccagaagatgcctgtgttcagatggaacttctcggacataacttcttcgtattctccaatgccgagactgatgaagtcaatgtagtatacaaaagaaaagatggttcatttggtctgatcgaaccagaattctcatagaacatatctattcagtataagtagatttattgaatgttatatgacacacacttaaaggaaaggaactcttgccagatattccggcagaggttcctttctatctcacaaaacaacatcttctatgagaatcattcttcatcaaaaatcttaattccatcttctgtccttgcaaaccaacaggttgtctcttcatccagaaccacctgaccgtttgtcccttccatcagttcagcccgcaggctgcccatctcatctgtcggaacaaacactgtcatttcaaccttatctgtgtaaacgggttctaattgatccagatttcgatttgcaatcagatattggattttccccaaatccgtataattcgtctcaattccgagtttcaccccatgaatccttgcaatgctctcactgttcttcaatccttcgatcgttgctgctgtataagccctgaccagtccacctgttccaagaagcgtacctccaaaatatcttgtaacaattacaagtacattcgtcagttctctcccacggatcacctccagaatcggttttcctgctgttcctgccggttccccatcatcactcattctttctgctgccggattccttcctataatgtaagcccagcaatgatgtctcgcatcccagtactgctttcttgtctgctctaaaatctccatagcttcttcttctgatgtgaccggatgcacttctgcaataaatctggatttcttttcaacaatttctccatttccgcccttatatattgtatggtagatttccatttttcagtctcccattctttttttatttttgctatatttgaaaatatttctttatctaatataccatgcttttctatataaaactgtattttttcttaagattttcaggaaaatttgaacttttcaaatttacctttatttacatcggtaaatttgatataatcatagaagtcaataaaggaggatattatacgtgaattacggaaaatcgaatctttctagaagaaaaaagcaaatttcttctaaaaagaaaaggaaaaagaagcgagtcggcgtacgttttttcaaagccctcattatttgttttctgcttttgatcgtcattggggcagccggaattggcatatatgtaaaaaaagtgattgacaatacaccggaagtcacagcaaaggacattatgccacagggctatacaacgaatattgtcgattccaatggaactttgcttgagcaactcaaagactctgattctaaccgtgtttacaagaaatatgacgagatttcaccatacatgggaaaagcttttgttgcgatcgaggacgaacgtttcttcaagcataatggtattgatatccagggaattatccgtgccggtgttaatggtgttgcacatggcttccatttcacagaaggagccagcacattaacccagcagctgatcaaaaacaatgtattccctaatttcatcaatgagagtaggtatcagcgaattgaacgtaaaatccaggaacagtaccttgcactaaagattgaaaaagagatgagtaaggaagagattcttgaagcatacatgaatacaatcaatttaggtcagggatgcctcggagttcagacagctgcacagcgttactttaataaagatgcgaaagacctgactctttctgaatgtgcagttatcgcagcgatcactcagagtccgtcgaatctgaatcctgtcagcaacccggagaataatgcaaaaagacggaaaaaagttctgaaaaacatgaaggagcaaggctttatcacaaaggatgaatacgatgaggctatggctgataatgtatatgaccgcatttccgaaacagcgtcaaatacaactgcatccaaaccttacacttatttcatcgatgctgtcataaatcaggttgtagatgatcttgtaactgagaagagttatacagaaacacaggcatataatctgctctatagcggcggccttacgatcaacgttacacaggatgctgatattcaggccatctgtgatgacgaagttgctaatgtaggggattatctcaatggtgatacagaatatgggcttgattacgcacttactatccacagggcagatggttcttctgagaactacagcaaagaacaacttgcttcttatattcagactgaatggggatatgacactcctcttctctacggttctgaagaatctgcacaggaagcaattgatgcatttaaatcaacgctcaatatcaatgaggctgacggagacactgttgatgagagaattgagctctcacctcagccgcaggcttctgttgttgtgatggatcagtataccggacaggtgaaagccatcgtcggtggacgcggcgagaagaaatccagtctttctctaaaccgtgccacagattctgcaagacagcctggatcctgtttcaagattcttgctgcttatgcaccggcacttaacgagggaaagatcactcttgcaacaacaattgatgatgaagaatatgaatataaaaacggacagtccgtaaacaactgggataaaaaatatatcggtccgacacgtgtccgttatggaatcgaacattctatgaacgtccttgccgttaagacattaactgactatgttggtgaaacggaaagttatgattatcttcttgattttggatttacaacactgactgaagatgataaatattcacaggcgaaagctcttggtggtatcacaaacggtgtatataatatcgagatgacagctgcctatgcagcaattgccaatggtggaacttacatgaaaccgattctttacacacaggttctggatcatgaaggaaatgttcttctcgataacacaacccctgagacacatgaagtcttaaaagactccactgcttatcttctgacaagtgcaatggaagacgttgtcaacggtgccggtggaaccggtggttctgcaagactgagcaacatgcctgttgccgctaaaacaggtaccagccaggaaagccgtgacttgtggatttcagcatttacgccttattatacagcgtctgtatggggtggatatgatgagcataagacaatggacagattaagccagaactggcatcagaaactctggagaaatatcatggaacgtatccaggatacaaaaggccttgagtacaaggactttgaaattccatcctctgtcgaagaaaagacggtttgtacagagacaggactccttgccgcaagcagttgtcctgctattacagagtatttctcaaaagacaatgctccgacaaagagctgtagtggtcattatgttgcgccatcagaagactctgaggaagatgataccgagagttctgatgaaaccacacctgctacaggtaccgattcttccggaacaacgtcatcaccggattcttcctctggtggaacaacaaccgaccccactgccggcggagactctggtggaacaactacaggtgatacttccggcagcactactggtggcgacactggaagtggaagtaccactcaataagtaaattatgcgccgcaaggcacacctaaaaaggagaggctatacaaaacgcctctccttttcgcatacttatataactgattgctcttgtcatcctgtccgtatctctctgatacaatattctgctatcttgttttacggttaatatatcttgctttatatttagaatatacaatcgtctgatctttatataaactataatatccggaaaccgcatagctgattgatatcgcgatcagataatatgctgctcctgaaaatccaaacagttcgaatgaaatcagcattgccgtaatcggacagttcgtcactccgcagaaaagtgcaaccatgctggctgccgctgctaattccggtgaaaatccaagtattccaccggcaacacatccaaatgttgcaccaatactgaatgccggtacaatctcaccaccacgatatcctgcccgcatcgtaagtgctgtaagtaacattttccataaaaaatcaagtggtcttgcttcacccttttcaatagctcttgcaatcaatccactacctgctcccatataatcttttgtattcagacatattgtgagcagaatgatcactcctgctgcaacaacaattctaatatacggatttttcagatactttgtatacaactgccccactgtttttagcaagatacagaatagaatacttaaaatcccacaccccactgcgatcagtgccatcttaagtcctgtctccacagtaagtcccgggatagaatgtactggaaatgtctccggatcaatccccattcctgttgcaaactctgctgcaataatagatgcaatcacgcacggaagaagtgctgcataatacattacccccacgctcacaacttccatcgcaaaaactgctgctgccatcggtgttccaaacacagctgcaaatgctgcactcattccacacataatcatcacatggtgatcaaattcatctaaatgagccagttttccaagccaatttccaatacttccaccaaactgtatcgacgcaccttctcttcctgccgaaccgccggtaagatgcgtcaataatgttgacacaaaaatcaatggtgctgacagaaacggaacatcatcctttgatttaattgtagcaagtacctgattcgttcctccgtcctgccttcctatcttctcatacataaatacaatcagaactcctgcaaccggcaaaagcataaaaatccaattatgtgtatccctgtattccgttgctgccttgatacatcctgcaaatactgcactcgcaccgcctacaaccagacctgtcaaaacagaaagccccatccatttcagaaaatttctcgtgttctgtcggatcctttcataataatactttattactatttttgtatcatgagaatgttttcgttttcccatctccgcattttctgtattttctttttcttccatttacatttcccctcttgtatttctcttttattccgaactctgattactttcttatgttcagatagaatcccttgccttatttattataaaatgattttcctcaccatgcaacacagaaaaaaggatggtttctcacattcgaacgtttcttgttcgttgtgtcaaaccatcctctaaatcaattattcttcttatacggtgatatgagtgtcaaaagtaaattttgccactcactgatgtaaccggattgctccattgctatgcaattcccgcaatcctcgaacacatcatactgcttcttcttttgtattcacactcttggattctctgtcctctttgaatttatcataatatgcaaacattcctgcaaggagtgttcctgaaatagaatgccatgtacaagatactgcacagatgattgctgactccggtgtggatgcaaactgtgctgttgttgttgcaaggtttgttgcaagtcctgcattctgcatacctacctcgatcgagattgttctcttcttcgctgtattcattcctgtgagtttaccagctccgtatccaagcagatatccaagtccattatgaagaaatactgctacgaagattacaacaccggactcaaagaatttgcttccctgtgaagatactacaccgccgacaacacatgcaagtccaagtactgcaataccaggcataattttctgaagttctttgaatgttttattttttcctaacagatagttaagtaagaatcctactgctaccgggaagataactgtttcaataatggatacaaacataggtaatcctttgattgaaatatgtgtaccacttgccagcagtgaaaccataagtggtgtcataactggtgagagcagtgttgaaactgttgtcattcctacggaaaatgctacgtctcctccacacagataagacataatattggatgacacaccaccaggacaacatccgacaaggatcagtcccaaagcgattccatccggaagattcaatgcctttgtcagtgcaaatgcaaggaatggcataatcagatactgagcgattgctccgatgcagatgtcaaacggtctctgcgccagaatcttaaaatcctctgttgttaatgtcagacccatactaaacatgatcactccgataataatagactgacaggtaaatttattggataccggatcgacaaacaaagcgttgttaacccatcccatcattgtcgggacaaagaatgtcactactgcaatggcaataacaaccactgaagtataatctgataaaaatttgctgactttttgtaatgctttcattacaatacctccttaggattcttgttcacctaaaatttgtattcttcttgagatatattcaaagaaaaaagtccctttccagaactcaatctgaaaagggacgaatataatccgcgttaccaccctaattccgcaaaaattaattctgcgacacttcacataccaacatatgctatccatataacggtggatcccggcgaggtttacttgcaacatgttcatctgctttcagcccgcttcttagagaggatatccttacccggttattgtctgttcacaccagccacagactctctgaaaataatgacggatacggttttgttctcatcaacgaattttggtgaactgtattttgtttactctgacattatagtcctctgaaatcagaaatcaagagtctattttaatctttttcttgatttattttaatctttttgtcgtaaaaatttattttcaaggcttaaattcatctgaaaaaataaaagaatcattgaaaaaaaattattgtttttcctgttgtttccccgcacttttcatgctacactgtatataagaatcatcggattttaaccagaaaacagatagttactgttcactcccgtgtcaatcacttcgctgattgacacggaggatgcatgttttggcttgaatgcatctcgccccatcgccaaaggcgatttaaaatagcgagatgcgttgctggtcacacatcgtgtgaacagtaacaacagatacggatgtttggggcatccaaaaggtttattaatgcacaatacaatacgttatttttcattgctttcttttggaagtgatgttttttttgtaattttatctgttttctttcattattttatctggtaaaggggtatttgggaatgaataatgaaataacgaaaagacgaaagcgaacaattgaaatgactcagggatctctttggaaaaacatgtttttcttcagtgttcctcttatattttcccagattttggaagtgatgttcaacttaagtgatgtcgctgttgtcggacattttgcagattacaaagcacttggttctgtcggctcgacaactacacttgtcacactgttcacgggacttctgatcgggctcggaagtggtgtcaacgtccaggttgccaataaactcggtgccggtgacaagaaagctacaaaagaaaccattcactctgcactcattatctgtgcagcggcaggtatttttgtctgtctgatctgtctgctttttgcaggaccaatgctttccatgatgaatacaaagcccgaactgctcgatcaggctgttctctacatgaaagtttttgcacttggcatgcctgccacggcagtttataatttcggcaacggtgtcttaagcgcccgtggggatacaaagcgtccgatgtattaccttgcatttgccggaatacttaatgtcctattgaatctgatctttgttatcgtattccatatggctgctgtcggagttgctactgccagtgcaatcgcacagtacgtttcaggaggattgatcctgatccatctgatgcgacgcgatgatgaatgtaaagtttgtctgcgcaatctgcgttatcataacatttatggaaaaggagttctttatctcggtgttccatccggtcttcagaatgcgattttcgcgattgcaaacctttttgttcaatccggagtcaactcctttgatgcgatcatggtttccggaaatgctgcagctgcgaatgcagacaatctgatttacaatgttatgtttgccttctatgtggcctgttccagtttcatgagccagaactggggagccgggaataaagaaagaatgaaaaaatgctatctcgtaacacttacttattctttcagtgcaggcctgcttctcggaggagcactcttcttctttgggcgcccattcttgtctctgtttgccacagaaccagccgttatcgcagctggtatgcatagaattaggattatgggattctcctatgcattcagcgcctttatggactgtgcgattgcatcttccagaggaatcggcaagagcattgctcctacatttattgtaatcatgggatcctgtgtatttcgtattatatggatctatacggtatttgcttacttccatacaattccatctctgtatctgctgtacatcttctcctggggactcacagcgattgcagaaaccatatactttaaagttagtttcaaaaaagtgcttgcataatagattttccaaaaaaagaggggttttcacagatatccaacctctgtaaaaatctcctcttttttctttctactatttattctgcacttgttatacttttatcaatcctcaagtaccagcttagctgctccgcagattcctgcatcatttccaagagtagcaagcttgaacttcacattcttatttgcaaagaacgctttttccataaatggtttttcgataaatgaaagcagaacttctcctgctttggacactccgccaccaattacaaatacagccggatccagtactgctgccatatctgccattgcatgtcctaagtaatttcccatctctgtcgcaacttcaatcgcaacttcgtctccttctttgactgcatcgaaaacagcttttgcagaaagatcttcttttgtcaggattgttgcacgtgtctcatgctccatcttctttcttgcaagacgagagatacctgttgctgatgcatactgctccagacatccgtgtccgccacatccgcaagtatctgtctcttccagattcacacacatatgaccaatctctccacctgctccgttctctcccgtcaggatctttccattgatgataatgccacctccaacacctgttccaagtgtgaccatgatcatattgcggtaaccaacaccgccgcctttccacatctcgccaagtgctgcgacattcgcatcatttccaaactctgctgtcaatcctgtcagttcttccagctctttctttgcattcttatatttccagccaagattcgcagaaccgttgacaattccatctacagtaacaggagccggcacaccgacaccgattccaagaacctgttctttctcaatgccgtgctgctctaacttaccattgattgcttctgcaacatccggaagaatcgccgcaccttcattctcagttcttgtcacgatctcccatttctctacaatagcacctgcctcactgaacagaccaagtttaaccgttgttcccccgatatcaacaccaaaacaatatttcataaatctatctccgtttctttttatatttcacataagaatgcggtactctgtaacatttgtaccgcatcctctgtttctcttttgttttattttcttctctttgccagattctcctgcacacgtttgtacaattcctgtgcagcgttgtatcccatctgcttctgtctgtggttaactgcagcagattctacgatgatcgccagattacgtcccggacggatcggaatattatggcagacaactcggtttccaaggaattctgtatattcctcctccagaccaagtctgtcgtattctttctctctgctccagtcttccagagtaatgaccagatcgatattctgtgtttctcttacgctctgtacaccgaacatagactttacatccacgattccgataccacgcagctcgataaaatgtcttgtgatatccggtgcagaaccaaccagtgtatcgtcactgactttgcggatctcaaccacatcatccgtcacaagacgatgtccacgcttgatcagttcaagagctgcttcgctcttaccgattccactttctcccatgatcaaaactccgacaccatatacgtcaacaagcactccatgaatggaaatgcacggagcaagttttacattcagccaacggatcagttctcccataaaggaggatgtcttcttacatgtaccgaataccggaatatcatttttctgagcaatctcaatgaagctttcatccggctgaagttcattgctgaaaataatacatggtactttatgttccagaagtttctgataaatctcaactcttttctcttcttccaaagtctccagataggcacactctacattccctataatctgtacacgattcagatcaaaatgatcgaaaaatcctgccagctgaagtgccggtctgttcacatccggaacaagaacttcacgttctgtgatatctacttccggagtgagatttttcagattcatcttttcaacgatatcggttaatttcacaccactcatcttgtaatctccttttcctgtatctcttttcgtttcagacatgctgccttgataagctcaagagatatatgatacttactgctcgcataaatccaacatttccctacatgtcccatcgcctgtacataagtatatcatgattttcttttcgataaaacccttaatcatgaaagaattgataaaccgattctgctgccttctcattcattgacggaagctgcgccagttcttctactgttgcgctccggattgcatccaggctcagataatgccgcatcaatgcctttcttctggccggaccgattccttcaatatcatccaaaacggaatgtacctgccctttgccacgcagctgcctgtggaactcgattgcaaaccgatgggcttcatcctgaattcttgtgatcagtttaaatgcttctgaattgcggtcaatcgggatttccacattattataatataatcctcttgttctatgattgtcatctttcaccataccacagaccggaatattcagcttcaactcatcaagcacctgcaatgcaatatttacctgtccacggcctccatccatcagaattaaatccggaaatgttgtaaatttcccagcttccgcattctcctcacgttcttttaatccatgtgtaaaacgacgcgtaagaacttctcgcatgctcgcataatcatccggtcctttcacactcttgattttgaacttcctgtaatcattccgctttggttttcctttctcatagacaaccatagagcctaccgattcgaaaccatttgtattagaaatatcatatgcttccatacggacgatctgttccagtcccaataaagatgctatctccttcgctgcaccgatcgtgcgtccttcttccctctttagccgctctttatctttagacagaaccatcctcgcattctcttccgccagttctaccagcttttcttttgtacctttcttcggcacacggattgttactttctgccccttcttcgcgctcagccaggattcaagaagttcctgctcttcgatttcttccggcagcatcagttcacccggaagaaaaggggttcctgcataatactgtttgataaaactgttcagaatttcagattttttatcctcttcgctgattctcagatagaaatggtctcttccgatcaatcttccgccacggataaaaaagacctgtacaactgcatcttcgtcctggcatgcaactgccatgacatctctgtcttccccactggaatctgtaatcttctgtttctgagccaccttttttacactatttaataactctctatattcgattgctttctcaaattccagtgcctccgaagcggccatcatcttatcttccagatcttttaaaatcatatcaaaatttccatttagaaaacggatcacctcatcaatggatttccggtattcttcctgggaaatgtatccctggcacggtgcctcacactgcttgatatgataattcagacacggacgctcttttccaatgtcttttggaagtgaacgattacagcttcttatatgatacagcttatggatcagatcaattgtgtcacgcaccgcctgtgagcttgtataaggaccgaaataacgtgccttatcttttttcatctgacgtgccagcataatacgagggtattcctctcctgttgtcaccttgatgaatggataggctttgtcatccatcagcatcgtattatatttaggccgatgttccttgatcagattacattccagaacaagcgcctccagttccgaatctgtcacaatatattcaaagcggcggatatgtgttaccatctgttcgatcttaacccctttattcctgctgctttgaaaatactgccgcacacggtttttcaggctgattgcttttccgacatagataatctgatccgtctcatcatgcatcagatagactcccggccttcccggaagctttttcaattcttcctgtatattaaaattataattttccatagatcctatttcttgcctctgctacagaccagctatgttcttctgcaatttgggaaacatcatcatactcgagtttttctttcaccactccatatccagatgctctcttcacatgaacggttccatattctgtctgcacttcgtctattttccgcttaagtccatatcttccacaaaaatactctctgacaccaagtgttgaagtgtgtttgaatatcagctgtagaaaatactctttctgctctgcccggcacatacatgtaagcagaatccccggccggtttttcttcatctgaatggaggatgtgtaaacatccaatgcgccttctttgatcagaagctctgtcgcatacccgatttcctccgaagtcatatcatccagattacagcacagttccaaaatttcttcttctaccttgtcttgcgtttctccaagaatcgcacgcacacagttcagtctttcatactctctttttccaaaaccataaccgatttcttccatctgcagaaccggcatctgttcatactttttaacaaaatgcttcagaagtgcggctcctgtcggtgtacagaattctccctccaggtctcctgcatacattggaatttctttcatcagatacgctgttgccggtgctggcaccggaaggattccatgtgcacatttcacatgaccatatccgacacgaaccggtgacgcaagaatctgatccacctgaagttcattcagcaaatagcagacagccacaacatcagccactgcatccatcgtcccaacctcatggaaatggatttcatccatgcgctgaccatgcgcctttccttccgcctttgcaatcaatttataaactgcaactgcgtcctgttttacctgatcttcaatttttaaccgattgatcagacgaacgatctgagacattgagtgatgtccgtgttcttgtgtatgcttctctggttcttctgatttatgtccgatctgctcttccgtctgcatatgaggattctcttcttcctgtcctttcacaaacacgcggacctgatatcctctgattccgcctcttgtacacgccaccaactgatattttacccccgggattttcagatcattcaactttttcacctgttttacaggttctgaaaacaactgcaataatgaagccgtcagcatatcccctgctgctcccatcccacagtctaaatataatatcctcattccttcgttctcctctctatgtgattgatccggcttgcaagaaatcccgcgccaaatccattatcgatatttacaacactcactccgcttgcacaagaattcaacatagaaagaagcgctgatacgccaccgaaagatgctccatatccaacacttgtcggaactgcgatcaccgggcaatccaccagtcctccaatcacactggcgagtgctccttccattccagctacagcaataatgacacgagcttccattaattcgtcgagatgtccaagcagacgatgtactcctgcgacgcctacatcatataaacggatcacttcatttccaagtgtctctgctgttcttgcagcctcttctgcaacagggatatcgcttgtcccgcctgttgccacaactattttcccgtctccatcctttattggagcttcgcctataaacccaatccggctgacttcgtcatattgaagttccaggtgttctcccacgtaaatcgctgactccttattcattcttgtgatcaggactgctttctgtcccttttccttcattgcttctgcaatccggaaaatctgttccggtgtctttccttctccataaatcacttctgccacaccctggcgcatggctctgtgatggtcaatcttggcaaaaccaagatcttcaaaaggctcttcttttaacttcaaagctgcctgttctacatccattgttccggatgctacctgtcttaaaagatctatcatttccttttgttccatctttttcgcctcattctaattcttcttatccagggtttcattcatacttcccattctgtaccctgttagatccattgtaacataagtgaatccgaactgcttaaattgttttacaatatcctcacggacttcttcctgaagcaacttcaaaaactcttccggcagtacttcgatcctcgccatccttccatgcatacggacacgaaattgccggaagccatgttcaagcaataactgttctgcgttttccaccatgatcaacttctctttgctgattgtttctccgtatacaaatcttgaagccagacaggcaaaagatggcttttcccaggttgaaagtcccatctcttttgacaattcacgaatctccgcttttgtaagtcctgcttcgcgcagtggactttttactcctaattccgccacagcctgaagccccggtctgtagtcgccaagatcatccatattagaaccttctgcaacataagcaatttcatttttctctgcaattgctccaatcttttcaaacagtgcatgcttgcataaataacatctattcggtgggttctgagaaaatccttcaatcttcatttcatccacctgacagaccttatgacggatatcttcttttttgcaaaatgcaattgcctcatttagttctctctttggaaaggaaccggattgtactgtgatcgccatcacattatctcccaatatctcatgtgccacctttaataaaaatgtagaatcaactccactggaaaatgcaatcgcaacactgtccagttcttttatgtactcttttaaatgtgctaatttattatgtaattcatcctgcatctttttcctcctgtcttgttgctgttctgattttttctatcaatcgtaattcttttcatgcaaaaaatgcacctaattacaatttcataaatcctcgtaatcaagtgcatttattatactatgtaaagcccggttcaggtcaagttaatttgtattgcttcattaattctatttcatgatatctcatggtttatagttccatcattccggacataatgcatcctccggaagcaccattttgtttcaattcttcccactgtttttcatcaaacttgattccaccaatcgcatataccggaacattcacagtactgcagacatcttttaagaatccaagtcctctcggtgccaggcctttcttgcaatctgtaatataaatatgtcctgctgtcatgtaagacacaccaagtctttctgcttcctttgcatcttccactgaatgaacggaagtaccgattctttgaaattgttctttcacaccttccggaagtttccttaattccggcaatggcagatgtacagatgtacattccaattccaatgctgttttccagaacttatgtaaaatacacggaatctcatacttcttgcaaacagacagaacttcttctgacagaatccgatattcctcttctgacagatctttttcacgcaaaataattgcctgcggtttcatctgacaaacccgttcaatttgctccaaaaatggtctttcgcacagttttctattactgacagctataattttcaaatccatcttcgataaatcgcatttcatcttacacataaatataatcactcataaccggctggagattatttttcaataatgcatcataaacctcatctaccgaacgttcatctgaaatctcaaactggtcatcgcccttatcctcgatatcatccacatggcttccaattcctgtacttacccctgctgaaatcttagttgctgcgatatttacaagattatctctgacacgtgcacactctcttgttgaaactgtaatgcttgcaaatggcataaacaaacgatatgcacagacaacctgcagaagctgtggctcatgaacatccatcggattgattctgtcattattgatgattgggcgaagtcttgggcaggaaaatgcgatttctgcatgtggatattttctctgtaacagatatgcgtgatatcctgttgcaaaagcatcttttctaaaatcatccagtcctaaaagcgcaccgaatccgactcctcgcataccacctttcactgctctctcctgtgcattgacacggtatgggaagattcttttatgtcctgccagatgaagcgtctcgtacttatctgaattatatgtttcctggaatactgtcacatagtcagctccacattcatgcagatacgcatactcatctgaattgaccggatagatttccagaccgatcactttgaaatactttcttgcaatcttgcatgcctctccaatatactctactgtagatttgttgcggctttcccctgtcaggatcaggatttcctgtaatcctgtctctgcgattgctgccatttctttctcaatctcttctgcattcaattgcgcacggttgatcttattgtgacagttaaatccacaataaatacaatagttttcacaatagtttgcaatataaatcggtgtgaacatataaacactgtttccaaaatgttttcttgtctctgtctgggctgcctgggcgatttcttccaaaaacggaagggctgccggtgataacagcgcacggaaatcctccggagtacgttccgaatgtgcaagtgcatttttcacatctgctgccgtatatttactataatcataggcttccattgcctcgatcacctgatccatgatttctgatccgatatcctccattcccggaagataagtcatatgatcgattctgtttttcttctgatcttccagtatttcttcacttaaaatactttcattaacatgtgtatcattcatctcaactgcctcctagtcttccagaaatcctgtcaatggtgaagatgcacttgcacctcgttcaattgttcttccaagacctgaaagataagcacttcttcctgcttcaattgctttcttgaatgcctcagccatctcctcgacatttcctgctgttgcgattgctgtattcgccataacagctgccgctcccatttccattgcctcgcatgcctgagatggacgtccgattcctgcatctacaataatcggcagatcaatctcatcaatcaaaatctggatgaagtcttttgtacaaagtcctttattagaaccaatcggtgccccaagtggcattacacaggcagcccctgcattcaccagatctcttgccgcattcagatccggatacatatatggcataactacaaagccctcttttgcaagaatttctgttgccttgattgtctcatagttgtctgggagaagatatttggaatctctgacaacttcgatttttacaaagttaccacaaccaacttctctggaaagtcttgcaatacgaactgcttcctctgcatttcttgctcctgatgtattcggaagaagtgttacattttccggaatataatccaaaatattcgcaagtcctccttcatttgcacgacgaagcgcaagtgtaatgatctgcgctcctgctttttctacacatgctttcacaagatcaagcgaaaattttcctgatcccagaataaaacgtgaactaaattcttttcctccaagtgtaaatgtatctttctgattcataacttaaatccttctttcttttttattcatttagatgtctttctatacatcctcttctccaagaagcaaacgcgtgatcatatttgcttcatgccctgcacagattgcaactcgtggagccattaatccattcccataagtcggctctgtcacacgatctccacataaataaaagttcttcatcattctcttagtactgattatatatatagagtaggcaatataacaaagtggttcaaatagaaaacacaacttttatttatcgtgtgatgcttctgatttatgtaatttgatagatggctcatcgagttgcaatcgcatgaagtacttgagatcggagctgctgcttgatgtagaagagacatagtcgaatgtaaaagagcaaaaggatttgtgaacagaaagcatatttagcacagttcacgcgcagaggaccctggtcttgtgaaagcacagagttcttggtattcaatatttttgggcgctttgccgcgaaggaggacttgcagctttacggccactttccgaataagacagaagaaatggaggagcagttctgccttcagctttttgtggtacctcgtaaaattgataaggtcagagacttacggggtcaaccatttcttggtcaactgacatcaggttttgaaagaggttgtatacagtatccgacgccgtgtggagatctggtatgggtaggctttcaaccagcctgtgcgaacataaggccgttataccatctcggaaagataaccggtttgattgtgagatggattgccgattcctgcatctacaataatcggcagatcaatctcatcaatcaaaatctggatgaagtcttttgtacaaagtcctttattagaaccaatcggtgccccaagtggcattacacaggcagcccctgcattcaccagatctcttgccgcattcagatccggatacatatatggcataactacaaagccctcttttgcaagaatttctgttgccttgattgtctcatagttgtctgggagaagatatttggaatctctgacaacttcgatttttacaaagttaccacaaccaacttctctggaaagtcttgcaatacgaactgcttcctctgcatttcttgctcctgatgtattcggaagaagtgttacattttccggaatataatccaaaatattcgcaagtcctccttcatttgcacgacgaagcgcaagtgtaatgatctgcgctcctgctttttctacacatgctttcacaagatcaagcgaaaattttcctgatcccagaataaaacgtgaactaaattcttttcctccaagtgtaaatgtatctttctgattcataacttaaatccttctttcttttttattcatttagatgtctttctatacatcctcttctccaagaagcaaacgcgtgatcatatttgcttcatgccctgcacagattgcaactcgtggagccattaatccattcccataagtcggctctgtcacacgatctccacataaataaaagttcttcatcattctcttagtactgattatattgctgctttcatagcctgccatacctgttgcagacacaagcttcttctccggaaaatgctccagaattccattcaccagcattgcttttgctaccggattatcaaatgcttcacagacaatctgagcatccgcaaacagttctttcaaattctcttctgtcaccttcacacaatctgtacgaatatccagatatggattgatctttaaaagcagtgactttagcgcatcggtcttatatattccgatatgctccatgaaatactgctgccgattcaaattggtaatatccaccacatcaaaatcaatcagatgcagatgccctactccaattcgtgcaagtgaatacgctacattagaacctagtccaccaagtccggcaatcgtcacctgaccggctgataaaagcttctgtttttccggcgaatggcgttcattcagcgctgtttcgatttcctctttgcttaatattctttctgatgccatctgatatcagcctcctcctacaaatgtcacaacctccagacggtcaccgtctttgagcattgtctctgaatagctgtatttcggaagaatttcttcattcatttcaactgcgattctattaatctggtaattgttctgctccagataatccgcaacactcatttcagatgtcagctggatctgctttccatttactgtaatcataactactcctttccggataattgaaaaaagagttcatgaaagaaatgtacccgtggtggtgcaccccttcatgaactctcgctcaatctcaacttattccaatcttcaatttttcctgattagtaacaaagaatgtgccttggcacattcttgcgcctgcggcggtcgcttgcgacatctacattgtacgccgcagtgtgcatccttagcggagcgttttatatattaggaaaacactttcctaatatataaaaagagagataccaacaaatgtatctctctaaagtactgctttatacattcctacgttggcattatccaaatcaggttatgggtcgaagttctcaacttcctctcagcctggtacacaagctccccgtgttttcttcacatgattagtataaaagcttatctgatagatgtcaaccgttttctctccatctgatacaagatcttttccgttactgttcacacaatgtgcgaccagcaacgcatctcgccattttaaatcgcctttggcgatggggcgagatgcattcaagccaaaacatgcatcctccgtgtcaatcagcggagtgatcgacacgggagtgaacagtaactcttttcccacaatgtgccagtccaacataacacacttctccggtcatctctgcgtcatattgtttttcctttatctgttccagtgccttttctgcaagcttttctaaatcgtctttttcatctttggtatacttgaattccaaaattaaatttggatatctgtcatgttttgcataaagacagatatcacttctgccttctccggtttcccgattgcttttgatatcataatcctttctaaaaaatgcacacattccaagcgtcatcatatggtaactattctcatctttcagatcatgataagatggcaattccaaaagaactctctgatactcttctgcaaaacgttccatatcctttcttttaagagcatttaacatcttttccatatgtctctcatcgattttcagatgacatgctgttaattctttgaacactttccacacttccagattaggaacccgaagtcggtaatagtcctcttcgatttcttttgtaattgttacaattccggcatttacaagaagtccccatagatttgcttcgtccattttttcataataagccattgaaaaatctactgtcacttctacttcaccttctgtgaccaaggtctcatattctttctcaaaagaccttccctgtacttcaagtgcattacgtaaaatactgttttcgcttgtattaacccaataagaatccatccttcttcttgccgcataacacgatattgaccatggattatatacatctgtactgccaaaatgatatccatcgtacatctttttcagctcatctgaaaattctgctttacaataagcaagcagctcttttacttcttgctctgtaaaaccaaaacagtcatcataatcttcgtcctgcactgtgcagacaactaaattattgagacccgaaaatacattttccttcgcaattctctgaatccctgtcagaattgccttttgaagataatcgttgcctttcagggacgttgccagaaaacgattcaacatggctcttacttcatcatagtatccttctgaatttgcagacataaacggagtatcatattcatctaacagcaaaaatactttttctccataatacgtactcagtgcctgacaaagaacagcaattgaacgaattacatgattttctatttcttttccgatgctttcctgacataaactattataaatcatattgaattctttcacctggaattctgacagtcttccatcattaaccatctgataaaagcgctcatactccgcacgtacagtatctttcaatgcataacacaaagattctgcatcccccgctttcacgttaaggaaagacaaaaatacaacaggatatcgattgagctccttgtagtggacagattttgtaatctttgttccacaaaataaatcggaggaatcttttgtgcagtcaagaaattctgccaacattgacatattaagtgtcttaccgaaccttctcggtcttgtaattaatgtaatctgataccaggattctaaaaactgttcaataaactgtgttttgtccacataataggcttgtttttcacgcaaatcgcgaaagtcctgtactcctattgcaagtttaggtttttcctcttgtatcccagatacattgtacagaatgctgtcttcctttaccacgtcacaacttgcaacataagttggttttcttccaaataattcatctaaggaacaggctaacacctcacttattcgttccagcacttcaaagtccggtgtccggtttccattctcataattggtataagtcgatctggaaatccccagtttttctgccatctgcgcctgagtgtagacccgggatttacgtaattttgtcaaatactcgttaaattttgttttcatagaatcaccgcttttttcttttagtatacacttttatgtttcattttgcaacattcttttttatttatatacaaagaaggacagaaaggtttcgttttgttaacctttctgtcctttttaaatagttgctatcttattttccttacagcatagctccgaaatctgttacgattgcctgtcctgtaattgcctttgattcatcgcttgcaaagaacaggattacatttgctacatcttctgctgtacaagatggtgttctaagattactgtgtgttgacattgcaccgatcatatccgggtcaagtgctgccggatttgttcctgatgtcattggtgtaatgatatttcccgggcagattgcattacaacggattcctgttgcctggaaacgaagtgctgtatgctttgtcactcctacgattgctgctttagatgctacataagcagctccgccacatcctttcactccagcgatagaagcaacatttacgatagatgctcctgcctgcatcttctgtgctgcagcacgcatgcaacgcatagttcctttttcgttcgtctctacgatacgatcaagatcttcgtctgagaatcgatcgattggtttcagtccttcctcaagaattcctgcattattcacaagaatgtctaccttgccatatttctcgatcacgagatccatcagtcgctccggatctcccttctttgagatatctgttgaaacagcgaaaacttctcctcctgctgccttaatctcttctgctactttctccagtgcagcctctcttctcgctgtgataacaacagttgcgccctctttggcgaacatctttgctgttgcttctccaactcctgagttacctcctgtaataatagctactttacctttcaaacgatccatttcaaagatcctcctttgttgttataggtgaaattatacaattcttctttcagtatttcaacctttttatctatattttacattttgttttatgctttatatttcatccaaacaaattcatagcctttcaaaactggatctttcacttctacaatttcaccattcaccagatttctgaaaatgccttcttcctgcatccacgcagtctgttcattttcgctgaaattaaacagtgcaataaatcgttctcccttatactctctgaggattcctaaaatactgtcattgtgaacatcataagtatatacttctgcttcctgggaaaagacattttcctgtcttcggatctgttccaatcggttcaacatctggaacaattgtccctgtacagtagaaagatcttttctcttatccgcgagttcccacaggaatgctcctctgtggagataacgtgaatcagatgctttttcagcatcatctttataactataatcatttacctgtcctaactcatcaccactgtaaagcatcggaattcccgactgtgtcaacatgtaagcgtggagcatgagatcttcttgaattgccacctgcattttttctgcatttccttcaaatcccgctgcttcaattccgcacatggatgctgttgttccacaaaatcgtgcatcttgagttacaggatcatcgttatataactctccacggctgatgctgtctgctatctttccggtaaaataatcattcagataacgcttatgagaaggctcttccattccccattgtttcattgtatcaaaatcaagcccccacccgatatcatcgtgacaacgaaggtaattcaaaaatgtatattgctttggcaaacggctaactatatccatctgtttcttcaaaagccggatgtctcttgtcgcaatactattccaggtcgtcgccattgttgtcacattatagagcatatgacattccgatttttcaactgtaccaaagtacggcaccaccttttccggctccataaccacttcgccaagaagtatcacgctcggacagacaatttctgcaatcatacgcatcattctgacaatcgtatgtacttctttcagattcctgcagcttgttcctaactctttccagatgtaaggaactgcatcgatacggataatatccattccctgattcgcaagaaaaagaaagttatacatcatttcattaaatactcttggattacggtaatttaaatcccactgatatggataaaacgtcgtaagcacataatgcccgatttccggaagccatgtgaaatttcccggtgcagttgtaggaaatacctgtggaacagtttcttcgtatctcgccggaatatcaccgttatcatagaagaaataacggctcatgtattctccttcgcctgctcgtgcacgttttgcccactcatgttcctcagaagtatgattcatcacgaaatccatgcatacattcataccattttcatgacatttttctgtcaatctggcaagatctttcattgtaccgagatccggccttactttccgaaaatctgccactgcatatccaccgtctgattttcctttcggagtatccagaaaaggcataagatgaagacaatttacattacactctttcagataagctaactttttttctacacctttcagattaccggcaaagttgtcaatgtacaacatcatgccaagcatttctttttccttaaaccagtcagaattcttttctttcttaatatctctttttttcaactctgtgctacgcttcaagtagtaatcatgcatctgctcacaaagttctgcatacattgcatcatttccatacaactccatgtaaagccagcgtaattcatcctgatgtttttccatacgctgtgcaaagattttttctgtattattcacattcttcaccattttctgttccatcgtcaaccaatttattttactctttcacaaaacaatactgatatgcctgatattcgcccggctctatcggaagcggcatgccgccatacataagtgcagctccggtgtatctttttccactcttttcttctcgatatacagctgtttcttcaagcccttgaagttttacataatttactgtcatatttccatgaatcacctgcataactatatttaaaagaactttactttgttctttctcatctgtatgcacaaactcccatgcgcagatttcttctgttgtcggatttgagagacgatagtacaatccgttctgaataatcgacgcatagctcttatattctgcgatttgctctctgatctcctgcttttcttcttcagaaagtttcataagattcagctcgtatccaaaagttccggacattgcaacaacacctcttgtatgaagtggggtctttcttcccgtctgatgattcggcactgctgacacgtgagaacctactaccgataccggataaccaaaggatgttccatactggatccgtaatctgtcaattgcatccgtattatcactacaccagatctgcggagtgtaatacatcataccggcatcaaatcttccacctccaccgctgcagccttcaatcagcagattcggatatctctgcacaagacgttccagaaaatcatatagtcccaatacataatcatgtaacactcttccctgatctcttgttacagaagaataaacatccatcaagcttcgattcatgtcccattttacatattcgatatttccctgatccaacactttgcaaatctgatcataaatttcatctacaacttcttttcttgaaaaatccaatacaagctggtttctgcttctgaccggatttctacccggaaccgccaatgcccagtccgggtgtttccgataaagatcactgtcttctgaaaccatttccggctcgatccagataccaaacttcacacccagatcattaattttcttgatcagatttccaagtgtgccaccaagtttcttctcattcacaaaccagtcacccagtccgctattatcatcatcacgttttccaaaccagccgtcatccataacaagcatgtcaatattgacttccttcgccgctttggcaagctcatagattgtatctccggtaaaatcgaaataagctgcttcccagctattgatcaagattggacgaatttcttctttatatttgcctctgcagatatgttgtctgatacaatgatgcagattctgagacaagcgattcattccttctgaggaataggataaaatcacttccggagcctggaacatttctcctgtttccaacggatagcgaaaagcttcttcctgaagtcctagcatcattcttgtctggtttaactgatctttcaacacttctccctggaaacatccactgtatacaaaggacattgcataacaatttcctttttcttctgtcgtttctttttctgcaaggatcatcatcggattgtactgatgactggaggttcctctgacacttccgattttctgtgttccatgcacaaccggaactctctgaacatttcgctccatcgcatgtctaccataaaatgttagaagttcataatctccataaaggaaatcaagacttgctgactcaattttgtttaaatagattttgccactgttttcatttttcacacacacacttcttgtaataacatcctgtgcgggaagcactccataaagaagcaccaccttaactcccgttaccggatcttccattaagatttccagtgtctgtgcttccttatcacttgcataaactgccggaagtccttgcagattatattttccatcaaagattttatgactcttgtaacgaaggtcgcaactcatacttccatctgcattttctactgcaaatgctgtacttctgaaatccccgttcccgtaacaaggaaattcctgtggaagtgtatccattgaatacgtacgatcttctcctgcatcatatggatttcccgaaaaccccctgtcataatatgtcagaagatagtccatacatccatcggttttcttcccgtaatatagatgtaacaaaaatccatagcgatccacctgcatctgatatgttgtattttttgtctgtaaagtaaatgttctgtctttctcgcaatatataattcccatatctaaatactcctgttttccattttagcgaagcaagatctgcattactgtctgttctcgcttcgctatcttttactttttattatttcactgctccattaacaactccgttgaggatatgcttctgacagatcagatagaagatcagaatcggaagcagtgccaacagataggaggcaaatgccagattataatttgttccaaactgtgtctggaagttcagctgtgccaacggaagtgtatttccgcttcctgaaccggacatgatcacaagtggtgtcataacatcgttccatgtaccaagtgctgtcaaaactgcaactgtcgcatgcattggtttcatgattgggaaaacaatcttccaatacgttttccatgtgctcgcaccatccacgcaggctgcttcttccaatgccaacgggatatttgtcaaatatcctgaataaagcagtacattcatcggcatataaaatacaacgtacagaataataactcctgctctgtttgccagtcccatctgcgccgtctgttttacaacaggcatcatcagaattgcaaatggcacaaacattccgctgacaacatagaaataaatgaatttgtaaaatttactcttcttatttcttccgattgcataccccaacagtgaatgaatcagaattgaaaggacaactgttacaagtgtaataaatacactgtttccgagagaatgccagaaatctgtcactctcattgcctcagcaaaattatcaaggctcaaatgacttggcaaggaaaggattccgctgatactattcgtcatctcagaaggcttcttcagtgcaattacgattgtcatatacagtggaaaagcaaccgtaatcagaccaagtaaaagtaaaatcgttacaggccagtttactcgttcttttattttcattttttccattacagctgttcctcctttttccctgtgattgtcatctgtaatacagaaattacaacaataacgataaagaatatcactgcgtttgcactctggaatccaaactgaccgccactcataccattgttataaatcagataagaaatggattctgtactctgtgccggacctcctttggtcaacgccatgatctgatcaaataccatcaggaagtttttcacacagagtaccatattgatgctaaagaatggaataatgagagggaatgtcagatgtctgaacttattccatcctgttgcaccgtcaatcgctcctgcttcgtaaacatcctccggaactgtctgcagtcctgaaatataaataattgtattcatcgcaatcgactgccatgcacacacgattacaactgcgatccatgccagttttgtactagacagcatactggaagaaagggtcttgcttccaagcatttctccgaaagccggaagaatgtatgtaaaaaagtaattgaaaatgtatcctacaaccaacgctccgagaacatttggaataaagtaggcaccacgaaacgcactcttgaatttaatcttactattcagtccgagtgcaaggatcaaactgattacatttgtcacaatcgtagctacaattgcaagtttaaatgtaaacagataagaacctccgactctgctgtctgtaaaaagatcctgataatttctaagtcctacccagtcaaagcttccataacctttgaaattcgtaaaactgtaaatcacacctttgatcagtggcaatgtattaaaacagaaaaacagtgccacgatcggaattgttatcagaagaaaggtcatttttcttccactcattgatttctttcccatgcttgaattccccttccttaatcttcgtccgcatgctctttctcgtaatcttccactttgcggatgatatcacggttatatctcttccagtctgtatcaaactttgttaagaatgcatccacatcccctttcataagaaatgtctggatctgtgcatctactgacatctctgaaggatagtaatgatcctggtaatctgccattcttccttcttctatgaaagatttcactccatcaagtgttggagcaagttcaaaatctccttccttacaaggaaccgctttctgttcatccagataactctgtacattttcatctttcaaaaggaaattaagcacttcatacgctgcctctttgttctcgcaatctttcataacactgaactgaagatccacaccagagttcagcttgttctctgatgcatcattattagccggcattacaaaggaatcgatatccatatctggatttactgtctgaatctgtgggattgcataacttccgatcgtgtacattgcagattctccgtttgcaaatgctgtacaagctccattgtaatcataagcgaaaggatctttcggtccatatgcaagcagtgcctttgtcttttctgctacttctctatattcatttgaaaatgttgtctctcctttgttcacctggctgcagacatctgccggtgcaagatcaacggcgatcgcattccacggtgcaagacaagtccatgtatctttaaatccaaaatacaatggctggattccttcactctggatctgttcacagagggctataaattcatcccaggtttccggaatttcccagccatattcctcaaacattgctctgttgtacagaactcctgctgcatttgccacatatggaacggcatacacaccgtcctcaggtacaaattccaacgctttatctatatccagataagcctgttttatagaatccagaccttcataatctgaaatatccataagcatatcagaatctataaagttagagaaattgacatctccaccgattccgataatatctggagcgtcttctctgataaaacgtgttttaagtactgtcattgcatcatttggagattcgatcgtcaaatgaatatcatcatgagttgcattgaattcttcttcaatcttttcaaatgttttcactgcctcaggtttatactgtacaagctcgatttctatctttccactattttcactcttctgtccgcaacctccgagtaccattgccgaagtcatacaaagcatcaatcccatgcaaatgattcgattgctcttcttatacatttccttactccttccttctaccatacacctttcattttgacacattccggaatatttttgtcatttcacttaggtcatctatttgataatcatattctaacatatctttatgccactataaatatcagagtttttttagttttatagcaaaatacaattttttcattcatatattgaagtcatctagcattttgatatataatgctatcagaggtgatttatatgagcgacttacttttttctgtatttccaaatgaaaattttgttgatctgggattatatcaatatggatgggaacaatgtgcaccggctcactcgttcggtcctgcagcaagaaatcattacattttccattatgtgatttccggaacaggaacattacttgcagatgatgaaaacggaaacaccatcacttggcaggtaaaaagtggacaaggcttcatgctttttccgggacaggtcaatacttatattgctgattctaagcttccgtgggaatatacgtgggtagaattcgacggtcttcgggcccgcgagattgtcacaaccgcaggtctgagcctgaatcaccccgtttatcatgcaagttcaaaggaacttcgcaaccagatgatggaagaaatgctttatctgagccgtcatcccgaagaatctccgtttcatctaattggacatctctatttatttttagattatttcatgcgttctgctgcgacagttcatgtgaagcaaaacggaagtatccgggatttttatattaaagaagctctttcgtacattgaacagaattttcagaatgatatttctgtagaagatatttccgcattctgcggattgaatcgaagttatttcggaaaaatttttcacgatacgattggacgttctccacaggaattcctgatcagttatcgtatgactaaggctgcagagcttttgaagatcacttcactgtcaattgcagatattgggaatgccgtagggtatccgaatcagttgcatttttcacgtgcattcaaaaatgtctatgggatgtcaccaagaaattggagaactgaaaataaaatagaactatgagaaacacgctctgcgagtttctcaagttatcctattaacatctcctgttcaatttccatttcactttccaggatacattgcttcaacgcttccaattgtccagcatttaatgcctctaattttttcttcttctcactgtttagtttaatgccttttccatttttcaaagcatcctcataagaaagaacatccatcttccatggagtcagatttgggaaaatatttttctcattgtataaaaagatctgtattccaccgtaatccatatctccccagtgataacactggatttcttccggtgctgtcttcattaacatttgcaaaaagcgaacttcttttggcgaaaagtagccatgacaaaagatatataaaacttttggatcatattccatgctttcgtaattcgctttattctcaattacaataattttttcaacatcatttcgtaaagttggaacggcatgctctaatgtctgtgcattaagtactgttccataataattcgaagaagtgtcaattttctcctcgctcgctatgccactgcgatctgtcagacaatactccacggcacctttccattctaatgtctgagaataacttaatattccatgtgctgccagtatctcatcatctgacattccctcgtcatattgcggagagtatttcaaagcttcaataactgcaccttgataaatgcgttcgaaaactttagatggtgtgatatcatttttcttttcaaatactttagagctgaacacacgcttccattccggttctttcagatcagctaaagctttcaggcatttaagaaattcttcatcctccgctttggataactctttcgtatttcctttattcagctgttctaacacatgatcacaataagcgcttagacagctttcggatacatccacctgcagtttacatattcttgaaattgcctgtaactggcgttctcttggatccatgattccgatcagctcacataatcttggaaccacttctaccctataatcaatcctcgtaatatctgtattcatttctctccagtcaaaatgcagatattcttctccgcctaatgctggaattctttccaaaacttttgcctgtctgaccagttcatctctgccacctactgttttcaaaagattcccatccacctttggatgtttcattcctgagagatttcctatacgatagtcctttgtattcgtcttatcgatcagccattttgccaatggcagattcttttcgttcaattccatattttatccttcgattttcatcagcactaatctgtgagcagtctatcaagcaacatctgcctattatttatgaacatttccgttatttgataactctctgtttcttcatattcacataaatgaattcgcccattgtcaaaacaatagatgtctgcatctggtatacctaatagaataggcgaatgggtaactataaaaaactgtgctccttcttttgcaaatctacataataaaaatcttcaattccgattggaagctttcttaattctgtcatttgcatctccttttaatttaaaccatgaaaaacacggtttgtgagtttctcacgtaaaacagaacccatgctatcgttgtttttaatgatagcatgaatcctgttttctgccaagtaaggatactaacgcattgtgctatttaaagtgtcatccttatccactcatccgccagctccggccactgttttacttcttcattttcctgttctttcttacgttctgtctgtccggtgaacattttcaccatctcattcaaagcctgtttcgcttcttccgatacaggaaatgttccatcgttcactgcctgccccagtgcaaaagtctgttccaatgtatatggttctccaaactcttcatttgcccatgcttcatcagcaagtgacaatccatgcttcccttttgaaaatacatggaatgcataaggaatcttcttttcctgtagcgcctgtgcaaataagaaggaattctgaaccggaaccagttcatctgtcgccgtctgccacaagaaacatggcggcatatcttctgtcacttgtttttccagagatatatattccagttcttcctcagaagcatcggctcccaaaagtgctgtaaaggaacctctatgtgcacagtcacctgatgtgatcaccggataggaaagaatgactgcatttggttttgcagatgcagtctgatatcccatctcataaaacttctttgctacgatctcaccttcagatggagaaactactgcatatccaccacccggtacgatcaggatacatggtcgtgctttttcaacttcatgaaaataaagtttcatgtttgggacaaaaccgcatgctgctacataattgtattctgattcagtgcattcactactgcctcatacatcggttttgcctgtggcgcagctcccagcagttctgcgagtgtcattccataagcgaactggatcattggaccttccagcattcccggtgccatctggttgaacatctcaactgcaagcggttctgcaacgatttcgccaagtgtgctgtccatactaaatcgctctacaacaagacttgtctctgtattatattcgtaatcatatacaccggaaccaacttcgtgtacttcctctttttccggaagaacaatcacagctgttgtattggccggaacttctacatggacatgaatttttccattcttgcaggatgtgtttgccacaatctttccgtaaacagaatcaaactctgtgccccactcttcaatgccttttacaaacattggttttacctggaatttcttatatcccggctctaactgagataatccggcaactttacgatacatccagtctcctacagaaccatacgcataatggttcagagaattcattcctgattcatcaaatgttccgtctggtttgattgaattccaacgctcccagattgttgttgctcccatgtttactgcatagagccatgacggataatcttctttcatgaagagagttgcagccatttcatgagctccattttcagaaagtgtatggcagatatatggtgttccaacgaatcctgtagctaaatgatttttgtgatttgcaatattgctaagcaatgtatttaaaatgcgttttctgtctttttctcttgcaagattaaaatacagggaaataattgcacctgtctgtgtctcgcttacgatacgtcctgtctctgtgtagtattctctctggaatgcatccaaagttgtttcataaagatccgcatactttttcgcttcttcgtcttttcccagcacctctgctgttttctttacaagctctgtcacatacagatagtacgcatttgcgatcatatatttatccgttgctccggttctgtctgcgctctcttctttgtccagtgcaagccagtctccgtactggaatccgctctgccagagaccattctcttcacagttgttcttgatgtaatctacccactcatgcatacatttccagttttcttccagaatacctttatcgccataaatctgataaaccacccacggaacgataactgctacatcactccatgcagaagaactgtaggaatccaaaatatccggcactacatgcggaacacccttttcaagagaagattctgctgccacatcacgcatccattttttgtaaaataatgctgtatttctgttaaatgccgctgtccaggagaatacctgcgcatctccggtccatccaagacgctcgtctctctgcggacaatctgtcgggatatcaaggaaattatctctctggctccatataatattactttgcagctgatttacttttttgttagaacaatggaaatcacctgtcttttccatatcagaatgtgtcacacaggcaataaactgatctgctgtaaattcttccattccttccacacagatataacggaatccgtggaatgtgaaatgcggacggaaaatctgctcttctccgttgcagataaatgtatcaattgattttgcctgacgaagtgtctccggatagaagtttccatctttgtccagtacctctgcatgacggagtacaatcttctggcccttttcacctttcacatgaacctcaacaacacctgtgacaatctgtccaaaatcaacgagtttttcaccttttggtgtcacaatcaactctttacccacaattttctctgtgatacgaacaggttcattctcctgtgctgttaatactcctttgtcaaaatctttaacaacaacatttccttctatgattttcggtgcatctgtgtcgattgtctcacccatgtaaatttcactgtaacggatctctcctgtttttacagaccatgtttcatcggtagcgattacatctttgtttccatcttcatattcaacatgaagctctgcaaatactcctgcctgtgtgccataacgatttggttcacaggtgaatcctaggatccccttataccagccgtttccaactgtaatcgcaatttcattttctgctgtaagctgctctgtcacatcataaatctgatactgcagtctgttgtgatagcttgtccatcccggtgccatacggtaatcaccgactgtctgtccattcagtgtcacttcatatacaccatgtgcagttgcatacagacgggctttctttacctttttatcaattgcaaatgtttttccaaataccgggcatgctgtctcttcttcagggaaatcacttgtgatcatctttgcgataaactctgtattgttaaaaattcctgtctcaaatgttccttcaattgcttctacatttccatggttatctgccacagatacctctactttataaagcatttcatctgccagtttttctccttcataagaaatcaaaacggactgatctgatgctttttttccactgttccagacaacgttacccttctcatctgttacattaatttcatatactgtctggattgtattctgctcttcggactctattttccatgaaaatcttggtgccttgtctgtcagtccgattggattttctctgtattctgttctaagatcatataatttcatctataattcctccatctttatatcctcaaaaagtcctttagccaaaaagggacagaaacttggtgtcagctccgtcccctcatactactatctgctatttattatctattttgcttcttttctcttctgcagttcagctacgatttcaggatatctcttctcaaggtcattcttcaaaagaaggataaagatactgtagaagtaagtgttgtcagacatttctttcttgtcaacctgaagatcactgtactcaaatgtcgtataagacaaaccatatccgaatgggaacgctgtttccatttttctggatgtgtaataacgatatcctacaaacacgccttctctgtaatcagaattatcatatccctttccataagtcagatagcaaggtgtatcttccagacgaagtggaaatgtttctgccagtcgtccgcaaggattttttcttcctgcaagcacttctgcaacagcctttccgactgcttctcctccaagataagcttctaagataccttccacctgatctttccacggcataatgactgcggaaccattgtgaagaacaaccactacgtgtttctgtacttcaagcactttttctacaagctcattctgacaatccggaagattcatatgctttctgtcatatccttcggattcaaagttatcaggaagtccgagaaaaagaactgccacatcagcttctgccgctgcctttacagctttcatctggagctcttcgataacttcatctttctcatcctgatatccttctgcaaaagtcacatttgcaagctccggaatctcctttgccgcttccagtgctgactctactttccagctgttgatgtgagagcttccgccgccctgatatctaggtgtctttgcatattttccgataaatgcaattttcttatcagaagtcagtggaagaatttcattttcattctttaataataccatgcactccgcttcgatttcagccgctgctttatgatctttttcataatcgaatacagctttctcatcacgattctctgtgtaacggaaaataatgttaagaattctttcacaagcctgatcgactacgctctcatcaagttttccttcctgaactttcttcacgatcagtcggtcatcctcataatctccaggtggcatctcaaggtcaagccctgctgcaagtgaagatactctgtcatttactgcaccccagtctgaaacaacatatccgtcaaatccccattcttctcttaagatctctgtcagatactcttttttgtctcctacaaattcaccattaatacggttgtaggaactcataaccgtccatggtttttctttcttaattgcaccctcgaaagatgcaagatagatttctctcagggttctttcatccatatcagatgagtttgtcatacggcgtttttcctgattgtttgcaacgaaatgctttgcacttgttccaacattcttgctctggactcctttgatcagtgctgctgccatctctgtagatacgagtggatcctctgaataatattcaaagtttcttccacaaagtggagaacgtttgatgttcattgcaggtccgaggattgtactgacatccattgcctgacattcctgaccgagcagttctccctgtttgcgaatcagctcacggtcaaaactggatgctgtcgcacatcctgccgggaagcagattgccttctcactctcgttgattccaagatggtcagctccctgtgcctgctttctcagtccatgcggtccgtctgttaccataacggatggaattccaagacgttccactcctttcagatgccagaagtctgctccggaacacattccggctttttcttccagtgtcatctgtgaaatcagactctgaatcttctctttctccatgctattacctccattttttatgatttcttacttcttgcttgttctatcggtttttcatcatggctttataataactggaaaacggtcgtatttatttcatttttaaacttttatttatatatttacacttttattatctatttttctattgacttggaaaatattttcgattacgctgatagaatgtaacgtacatagcattttcacacatagaacagaggcagaaacttatggaaaaaatatattccctgattaatttcataaaagcttattacccagactcgaatatccccatgtatcttttttcggatgaaaaatgtattttctgcatgccggagcaaaacgaactgactcatcctccattccaatatcttcgggaacttttttccggttctgaccgtatcacttactgtacgactgaatatggaatcatgttttgctctcttagattaaatcactggaaaaacagttacattgtttttggtccgatcacaactgtaccttattctgattccgacttgcaacatttatacaaagactacatggtatcaaacgacagccgccttgatttcaattcctttcttcgtcagattccatgtctatccttgccttctctgttgaaaaaatgtatctttttaaattattgtctgcacgaagaaaccatttcactcgaccagcttacttctgttgggcagacattttctgaaaatgatgttacgaccgatgcctctcttcttttggaagaaacttatcataaaaaggaaaatgagcaacacaaccagacatatattcttgaagaacagcttttgaaacttgtccgcacaggtaactgcgaaggatttaaggaatttatgtatagcgaaagtaactttcatatcggtgtcacaggctctactgctctacgtcagttaaaaaataatattatcatcacaacgaccttatgtacccgtgctgcaattgaaggaggactggattatgacactgcatatcagctctctgattatttcatccaatcttctgaacgactgacaagtgcggaccggttaactgatcttctcggaaaagtcagttatacttttgcagaaaaggtggcacaatcaaaaacgcccatctcaacagacgagcgcatgcagaaagcaattcgttatattcagcagaacgtgaatcagcacctcaccgttggagatgttgctgattacgtcggattcagcaaatcctacttctctgcctattttaaaaaaacacttggattctctgtcagtgcatttatcctacgttgcaaactggaagaaggtagagaattactgcagtatacagataaatctatcagtacgatcagcgaatttctgtgcttttccagccagagtcattttcatactgcattcaaaaaacaatttgggataacaccgtcagaatacagaaagcagcagaatgattgatcctgctgctttctctgtatcatacggtacgataaccgtttccttattcatttccctcaaccatatccaggtaatcgcctttatcaatatgcatcatggatacctgattctgatgtcttcggaatccatagacacaatctacatttcgtatcagcgactgtagacgttcatccggcacacatacgatcagctgaagctccagctctctcgcataatgaaggcacacttcgcttcgctccttatccatcttggaaaatgcttcatcaagaagcaccagacggatcttagaatcacggtttgtctgctgcatatagagcatcgcaaatcctgcaagcagtgcgacatatttcgggttctgtccctctcctccggagtcacggcctgccatatcatcgactgcatttttgcggatatttccattctcatcttccaccttttcatacatactgaaagtcagataattacggtaatccacatactgctccatctgctgacgatactggcttaaggatcttgcatcttcctccttaggaggcatgaacttctcagtcagacgcttgatatcttcttcatacttctgatagaactcatcctcaccaagacttaactgaccttcaaatccgtagtcatcgaacactttactgtctagttcaggtgctgtaagcatctcatagaactgtccattttcattctgagccggtatgatatcaatctggtagatactatctgagaacttgatcttcgcaagcagacggttgatctcttttttatgtctgtaagctgccttgatttcaccatgaatggaagcaatcacattttcacgcaatgtatagtaaaccagattatactgcttatcaaattcttccttgtacttcggttcaaaatctttcctacactgattcagcactttgtcatacacatcattttcatgttctattcctgtaaaaccataggccggataagcattattgaacttatttctacttctttgcagttcttctttctccgtctcttccaacatttccaaagcatccttttcttttgtcttgtctctcttataagctgcttcgctctgtacttttaacgcatctgttacttcattctgaagctgttcgttaacaacaaatccctctgtcaggaagtttatcttttctgaaaatgatttgatattactctcgatttgtccctgtgtcttcgcatactgtactacttcactttgaatgctatcaagaatctctgcatttttcttaagcaactccagtaattcctgctttttcttcttcagttcgactgtccggtcgcctcgtttcaattcttctacttccagacgtaatttttcctgtttctcgtaataatcctgaagctgttccgctgcttttgaaagatgtaagatctgttctgtgctctggtttagacactcgaatttctgtgctgcacgcagtgccatctcaacacggcagtcctcttccacttcctgtttcagcttcgctgcttcttcttccaactcaagaagtttcgcctttgagactttcgttccgatgcaggcatatttctcataatcattctttcttaaatgtctgaaaatataattgctgtaggaataacagtcctttgtgacaccatctctcgtctcatgaagttcttctactgtctcacatttcttaatgcggcctaagtatcgcttcagacaagtatctacataagattcctctgcgcgcacacactcatacagtgtgttctcatctgccttcggcttgtctctcacgattgccgcagtatccatgagttcgacatcctcgattcccttcatctgcttcattttgcgaaatgctttcgcagcatctaacgtatattcaggtgctgtcaccagactgtgtttcacacgtcccatacgtccttcgattgcatttttccactcttcatccgtaatatcaaacaagtccgcaaagatatttacatggattgttcttccatactgagtactaagtatattctgcaattcctgtcttgcacgcttcaattccgcacgatatggttttctgtcatttttgaggtcttctaccatctcccgcttctcttgaagttctttctgattctcacgaattctttcgcgaacatcgcctaattctgtattgatgttatcgagtgcatcacttaaatattgctttagcttttcaatcgaatcttcactcacaacaccatctcggatatcatcaattctatgcagcgcctgattgctcacataagcactgacttcatcatcttcctcccaggctgaaagaccttttacaatatccctccattgttctgaattcgttgccaggagctggatcgtattttcaatctcctttagctccttctctttctgtccataatcgctggctttgagttctgcctcgacttctacctgctcttttgtataagcgtctttctctgccaaataagattttctcttttcgtctttttcctcgatcttcttgagaatatcctgcagatcatcctctttcgattgcaaatgtgccttacaattttctatttcaatatattttaagatctgttccacatagatcttatcagctcttgctttctgcaaggctagattatgctgactgatctcgtcaagcattttaattctctgctccagatcttctacgcgttccttgatctcacggtaagcgccaagctgatcactgattgttgcaactgtgtcttccttgctctttgggaacatataatctttgataaactgtcccgttccgttcgtcatacgaagtgcaatcgcgcttttctccattgtcatcatacggcccggctctacataaccaaagattgcatcataaaccgtttttaaatacgcttctttcgatggatatacacggttcacatctccgcgacctctgttgtcagccgattctatccttgcttctaccaattttttaagtttcgcgattgtatacggaacaccttcttctgtcaaatattcatcctccggaatctttccggaatgactgaagaaacaatatttcctgatgtctgtatctgcctttccaacctcaaatgaaacaccaatacaagtatgtgtattctttcctgtatccttaatctccaagacgatctgagaacagaagtcctggtcttctcggttaaaggaaccatctttctgcgctcctctaagataacttagaacactacgcctgttcttcgcgtcatctgccgctttattcaagaatgtggaagatatacttccatataaaacaacctggattgcatccataacagtagacttaccagatccacttttcccactgaaaagattcacatactcatggaactccatcactttgtgactgataccgccccagttattcattaacattctagtaaatattttcttcgactgtttctctttcatcttccacacctccctctgcttcttcctggatttcctgttcagaaacttcttctgtaatctcttcctctgcgtactgatcttcctgatattctttgatcaacgcagtaatatccatacttccacaatatagattgatcgtgctgtagatataaatcggagtctcatcctcaacattctggattgctcccggcacttcaatgatctgatgcttactcatcacatataaagtttctttccactcacccatcgtaagcttataattaatcagattcgtattctttccatattcacgaatctccgccagattcgtcactgtagctttcaagccttctcctaaaatcttatctctgtaaattaatttaaccagtaagattacttttgtaacggtggcatttatcttttctatcgcaattccatctccatgtaaacggtaaatgtgttcctgtgggtcatgcactaattcacagcttaaaacagacagatagtcttcaataaactttctgtgtcttgtacagatctcataatgcagattgtctcttgggacaagtgttacaggatcatatttcatctgtaaaatacatgtctgtctgaataatgcagcaattgttttcttcaggttatcagcttctgtcactgacaattcttccatataattaaccatctgattctactccctctatcgtaagttttgaaaatcggaaaccagcctcattctccatctcctgcgccacttcaatctgtgccttactgtccgcagattctgttgcatgctgccataccataaataacttctccaaatcttctattgattttacagtatcttttgtcactgtgaattttccattctgttcatttttctttcggaaatctctgatctctttctgcgtatacagtggttccaggacaaattctgtcatattctcttcctgtgatttctcaggtgttaccgcctgtggagtgaacttttccttctgattttcacgtctttgatacagactcttctctgtcataatcttatatggctccgaaaacctaagttttgaagacagcttatccaggatttcttccgacttgccactttcattgatcagattaatcagtgcgactgtctgatcttcttccattacaccttccatcataatgtaccggattcttgctgcggcacggcttgcaaatactgtcttttgttcaatcagcttattatatcttcgctcaatcgcatcaaactctcgcgaaatcttgtagagcatatctgtcgcctcttcacagatctcgatcattcttcgcagacggtaagattttctcgtattttcctcttcgcttaagagttctgtttcaaatgagtattttcttgcttctgtcttttccagattttcttcgatcaactcttttacagcttctttgtatcgataaaagctgtctgttgtagtcaatatcgcgtattttttactgtcactgttattgatctctttcacaagtacttcctggattcctcggaaacttctctgctttgacagttcatcgaaataacctcgcattccctcctgcatgttcgcgagcatctgcagaagtgctcttgatgtatgaagcgcactttttaaaatctcattattcttctctttgtctaaactgtaggtatagagatgactgtataccgtaagcacactctctcgttccttaccgtcattttcactgtataatttctgaaataattctacaaacagctgactgtattccggaaatgaaacgacataactgttcagcgtttcatcataatcccttctaagccatccccagtcttcaaaatgcttcagactgactgatgccatgttggctctggtgatcagttctccttcttcatcgactcttgcctcactccagtccagtgccatcttcgccagtcgttcattcatgatcatctgacactctcgttccgtaagcccaagaagagaaaaagactgactgctctcctcataaagcgctaccagaaactgcatatagaattccatatatttacttccaaatattttatatagatcctttggaactttttcgaccagtttcatgttttttcttatgtctcctttttattcctattaatgtttcttttacatctttttcatttcttataacatcttctctgcttcaaaaaactgagaaaaatgtgcaatgaccggacattttcccttctctgtctgaagccactcgatctcattcacatcttccttcgaccgatacaagatcaccggcattcctatattctgtgctcctgtcacatcatgtgcgatgctgtctccgataaagatactttcttccaccatcactcctgctttttcaacacagagatcaaaaagttttcgatgcggtttttcctcgccagcctcttcacttgtcacaattccatcaatatacttacctaatccaagctttaatatcttccgatactggacgtctgaagtcatattggatcctataccgatataaatgcctcgctgtttcaattctttcatcaactcttcaattccaggagatggaataatctgatcaatcaatgtatcccagtacagattatacatctcatacgcatatgggaaaactggctttccaagtgtctccagcatacactgaaatctcaccaggcgattatggttcaccgcataatctcttccggctctgtcatctgccttcactcttgcctcggcaacatatttctccaagtcttcttttgctatgcctaaattctcatatgcccattctttcatcaccggcatcgtattattatgcgctccaatgtaatcataaatggtgtcatctatatcaaaaaatactgcttttgtcatcccaatgtctcctgtttttttgctactgtcttgattgatgttttacatcttctgtgccttgcattcaagaatgcctctgcattcttgctgcgagatgcgcgtcatgcaatgcatgacatacttcttctgcgcatctctgcaatcctgccggaggctatatcagatgggagtcatctcacatctgatataccctgacacattttgcctcatttcattataacatgttttcatcaaagaaaaagagtttcgcaaatgacttttcctattcatctgcgaaactcttaatactgataatcagctcttactctgacttttcttcttccaccgtttcttgtgactttatttctgttgcctgtgtttccggctctttttctgtttccggttctttcactgtttctggctctgctgcttgtgtctctgtcggcttcatcaggattcttccggactcctgctcttctttcttttctccatctgcttcttccggttcagggattcccttcacttcacggaagatcttcatgaattccttacctgtgatcgtctctttctcgatcaggaaggctgcaatcttatcaagagcatctctgttcgcactcaagaggcgttttgcttcttcataggaagctttgagcatcttcatgatctcttcatcgatctccgctgctgtcgcttctccacagttacgaactgcacgaccgtctaagtaccggctctgaacagattcaagtcccatcagaccaaagcgctctgacataccatactgtgtgatcattgctctggcgatcttcgttgcctgctcgatatcattcgatgcacctgtcgtaacagtgtcaaatacaatctcttctgctgcacgtccaccgagtgcaacaacgatcattgcttcaagttctttcttcgtatttaaaaacttctcttcctccggtgtctgcattacataaccgagtgctcccattgttctaggaacgattgtgatcttctgtaccggttctgtattcttctgaagtgctgtgacaagcgcatgtccaacctcatgataagatacgattcttcgctcttctgcactcatgatacggtctttcttctctttacctacaagtacaacttccactgcctcaaagaggtctttctggctgacaacctgtctgccatgcttaactgcagtgattgcagcctcattgatcatattggcaagatctgatccaactgctcctgaagttgcaagcgcgatctcttccagattgactgtctcatccatcttaacatccttcgcatgaaccttaagaatctcgacacgacctttcagatccggcttatctactatgatacggcgatcgaaacgtcccggtcttaacagcgccggatcaagtacctccggacggtttgttgctgcaagaacaagtagtcccttattcgtatcgaatccatccatctctgcaagaagctggtttaatgtctgctcacgctcgtcattaccgccaccgccaagtgcgctgtcacggctcttaccgattgcatcgatctcatcgataaaaacgatacatggagccatctgctgtgcctgtttgaacaggtcacgcacacgggaagcacctacaccgacatacatctctacgaatgcagatcctgacaaggagaagaacggaaccttcgcctctcctgcaactgctttcgcaagaagtgtcttacctgttcccggaggtcctacaagaagtgctcccttcggaagcttcgctccgatacctgtatattttccaggattgtgcaggaaatcaacaacttcctgtaaggactccttcgcttcatcttcacctgcaacatctaagaatgtcacacctgtctgcttctccatatacatcttggcattgctcttgccgattcccatcatgccgccgcccttagacatcttcttcataaggaaattaaacatgaatacaagaagtacgatcggaaggatcactgtgatgaagatatccatgatcagtgaacttgccgtatccggaatctgggatttaaactctacccctgccttatctaaacgctttacaagtgtgtcatctgatacatttcctgtgtaataatccggttccttgctcttggagctaccctgcatctgactgatctggccaagcagactgtccatagcattttcctgatcttcgctttccttagaatctgaactatcactctggtctgcagaaactttctcattatcctttacttctgtaagttttccctctgccttttcctttctggcgtcatctgtcaaaacgatattgatccttgaattggtaaatgtgacagactctacttttccattatcaactaatttcagaaatttatcatagctgatctcagaagcgcttccgccctgcatcatagaatataggcccataacaacaaaagtaaccaacaaggtagtgaacaaaataattccccacccctgtcggttcttgttcggacctttgtttttattgttattctccattttttgcctccaaaacttaaatagtggttattttccagcaaatcttttaccttatttgtaaaaaaacaactacttcctaccattataaatagtggttttccataaatcaataaaaagattatgaaaatattgtaaaaacgtgccgtttcatagtatactagaaaagtaatgcctgtttataacagatttatctgttaataatagtaataacagttcggcaaaatttatagtaaggaagataaaacgatgaaaattggatttgataatgacaaatatctgaaaatgcagtccgaacatatccgcgagcgtatcggaaaattcggtggcaaactctatcttgaattcggtggaaagctttttgatgactatcatgcttcccgtgtacttccgggatttgaacctgacagcaagctgcgtctcttaaaggagctcagcgaccaggctgagatcgtctttgcaatcagtgcaaaagacattgaaaagaataagattcgtggggatcttggtatcacttatgattcagacgtaatccgcctgattggtacttaccgtgagcagggacttttcgttggaagtgtagtaatcacacagttctccggacaggaaagtgcacttctgttcaagaaccgtcttgagaaccttggaatctctgtatacattcattacaacattccgggatatccgtccaacattccactgatcgtcagtgagaatggttacggaaagaacgattatatcgagacttcacatccgcttgttattgtaacagctccgggacctggaagtggaaagatggctgtctgcctgtctcagttatatcaggagcaccagcgcggaatcgaagccggatatgcgaagttcgagacattccctatctggaatctgccgctgaagcacccggtaaacctcgcttatgaggctgctacagctgaccttaacgatgtaaatatgatcgacccatatcatcttgaagcttatggtgtaacaactgtaaactacaaccgtgacgtagagatcttccctgttttaaatacaatcttcgagaagatctacggttccagcccatacaaatcacctacagacatgggggtaaatatggccggaaattgtatctgtgatgatgaagcctgccgtgaagcttcccgccaggagatcatccgacgctactatgcagcactcaatgcgcttctgaaaggtgatgcttctgagaaagaagctgagaagatcgaacttcttatgaatatggaaggaatcactgtttctgaccgaaaagttgctgtcaaagcactggagcgtgctcagcagacaggtggacctgctgccgcactggagcttgaagatggacgcatcatcaccggaaaaacttccaacctgctcggtgcgagcgctgcccttcttgtaaacgtactgaaggaacttgccggcatcgatcacaatgtccatatcatctctccggaagcaattgaaccgattcagaaattgaaagtggattacctgaacagcaagaatcctcgtcttcacacagacgagatcctgattgcactttccgcaagtgctgctgtcaatccgatcgctgagcttgcactctcccagcttccaaaactgaaaggatgccaggctcatacttccgtaatgctttcaagtgttgatatcaagacatttaaaaaacttggtgtacagctcacaagtgaagctgtgaacgaacgtcagattttaagctaaagacaaatccttaccaatacagaaagaaagatatcgcaaaaacctctctgcagtttcaggtataacaacctgctgtctgagaggtttttttctgcatttctcccattttacaaagctttttcgccttccttctttacattgcttcgttaaaatcacttcatcccatcttttttctatgtttttatcaaaaaagtattgtaatttttttctgaataggtgtatacttggaaagtattttttttgataacaactattcacggaggaggaaagacactatggcagtaaaatatgtatttgttacaggcggagttgtatccggtcttggaaaaggaattacagctgcatctttgggacgacttttgaaagcgcgtggttacactgtaactatgcagaaattcgatccttacatcaatattgacccaggtacgatgaacccggtacagcacggagaggttttcgttacagatgacggtgcagaaactgaccttgaccttggtcattacgaaagatttatcgatgaaagcctgacaaaaaattccaatgttacaacaggaaagatctattggtccgttcttcagaaagaacgccgcggagatttcggcggaggaactgttcaggtaatccctcatattacaaatgagatcaagagccgtttctaccgtaatccggctgcaacagatactgagattgctatcattgaggtcggtggaactgttggtgatattgaaagccagcctttccttgaatccatccgtcagtttcagcatgaacgcggagcagaaaatgttatcctgatccatgttacgctgattccttatttaagagcatctcaggaaatgaagacaaaaccgacacaggcaagtgtaaaagaacttcagggaatgggaatccagccggatatcattgtctgccgttccgaatatccactggatgatgcaatgagaaacaagatttctctgttctgtaatctcccggctgaccatgtacttcagaacctggacgtagaatatctctacgaggcaccacttgccatggagaaagaacatctggcacaggttgtatgcgagtctctgcatcttgactgcccggaaccggatcttacagactggactgagatggttgaaaaccttcgtcatccaacacaggaagtgactgtagcactggttggaaaatatatccagcttcatgacgcatacatcagtgttgtagaagcgttaaagcacggcggaatttacacacacacaacagtaaatatcaaatggatcgattccgaaactgtaacagaagaaaatgctgaagaactcttctctgacgtaagcggtattcttgttcctggtggatttggccatcgtggtgtagaaggtaagatcacagcgatcaaatacgctcgtacacacaacgttccgttccttggtctctgccttggtatgcagctgtctatcgttgaatttgcaagaaatgtcatcggttacaaagacgcacacagcatggaactcaatccagatacaactcatccggtcatccacatcatgtccgatcagattggtattgaagatattggcggtactttaagacttggttcttatccatgtgtactcaaagacaactctcttgcttataaactgtatggaaagaaagagattgaagagcgtcatcgtcatcgttatgaagtaaacaatgactaccgtgaagttcttgaagaaaacggaatgtccctttgcggactttcaccggacagccgtattgtagagatggttgagattccttctcatccatggtttatcgcaactcaggcgcatccggagctgaaatccagaccaaacagaccgcatccactgttcaagggattcgttgaagctgcactggagaatcagaaagagaaaaataaatagcaaaattttaaaagtcacactctaaagtggactcaaaaaaggatttgatcgtatctggcaaaccccagatgaatcaaatcctttttctatctgacgacaggttcttaaattcctgtccttcacttattatcagcagatttctttttctctgctctctttttcatgatcagctcttcaatcttccatcctgcccagcccgagaatagtccgacaatcaatccgccgagaacgtcggtcggataatgtacccctacatataatctcgataatgcgatcaaagtagccagaaccattgctgcgattctccacttctttggaaacacttccttacacctacaaattgcaaatgctgatgcaaaggatgcacatgtatgaccggaagggaaggaaaaatccttctgtttctcaatcataagatctaattcctgtatcacttcatacggtcttattctggcaaccacattctttatcgccacatttgtgatcagtgttcctataataagtgcaagcgctgatgcaagccctgccttcctcgtcttcttaggaatcagcagaacgattgtaagaagaatccaaaaaattccaaagtctccaagatgtgtgattcctttccagaaccagtccatccagtcatgacggatatattcctgaataaaaagcagaatgttctgatctaattgtaaaatagcgtccatttctttttgtcacctctttcaaatcattttcccagaacggtttctttcaaaaacaattccttcactacagattcatatactacacatttctcacatttcttaatcttcttgaaatacttccttccatctgtaaagatgggatgaagatagaaccacatttctttcatcttatagagaattgtcctgtctcctgacatttcttcacaatatgccgcatagagaacatcatggaatttctttagctcttctatcgttgcggcacttccgccttttagctttcttccaagtgccggatcggccagcacgccgcgccccatcatcacagtatctgtctgtggaaatcttatttttaactgttccatgtcctccacagaacaaatatccccattatagcaaagcggatgttcgctatgttccactgcccaggcatatgtatcaagctttggtgtgttcttatagaactccttctgcacacgcggatgaatgatcagctccttcagcggatatttattatagataggaaggattgtctcaaactcctccggatcttccattccgattcttgttttgattgagatttccagattacatttctcaaaaaccgcatccagaaatcgatccagcttctgtggctcatccaaaaatcccgctcctcttcccttcgtcacaacagttctagacggacatccaagattcagattcacttccttatatccataatctccaagtttctgagctgtgcacaagaaatcttccacgttattcgtaagaatctgcggcactgcatacattccctgattatgctccggcatcacatccttcttctctcttgtgctgaaatgtcctttctgattcggactgataaacggaataaaatacttatcgaatccgtcaaagcactgatgtaatgcatttctataaatatgtcctgtgatcccctccaatggggcaagatataaattcattgatcgttctcctgactttttccacttctttgcattgtttttaacagtaataacatttttatcataccccgactttcttgtcaagaatatttacttatgctaaactaatgtatataagaaaaaatacgaaggaggatttatttgtttatgaatacactaaaaaaattcatccactactatggcccgtacaaaacggtcttttttattgaccttctctgtgcagccattatcagtcttgtggatcttgcttatccgcagattctacgaagtgcgaccaagacactttttactcaggataaagcaattatcctgcaggcgcttccgtggatcgcgatcggactctttatgatgtatgtcatccaaagcttctgcaaatattatgtcagctgtcagggacatatcatgggcgctaagatggagcgggatatgcgtcaggaactcttcgaacactatgaagagctgtccttttcctattacagtcagaacaactccggtcagatgatgagtaagctggtcagtgacctgttcgacatttccgagtttgcacaccatggcccggagaacttatttatctcattagttaagatcgtcggatcctttattttccttttcttaattaataagaagctggctcttccgctgatcgtacttgtgatcttgatgttcctcttctctttccgacagaatcagaagatgcagcgcacctttatggaaaacagaaaaaagatcggtgatgtcaatgcgagccttcaagatactttatccgggatccgcgttgtccagtcttttacaaatgaagagatcgaaaaggaaaaattccagaagagcaatcacgccttccttgtctccaagaaagacaattacagatgcatgggcgaattcatgagctccaatctctttttccagggaatgatgtatctggtcacacttgtatacggcggctatctgattgccaacaatgaaatgtcagctgctgatcttgcgatgtatgctctttatatcggaatctttatcagcccgatccagattctcgtagagctgatggaaatgatgcagaaaggactttccggtttccgccgtttccttgatgttatggagacagaacctgagattcaggatgcaccggatgcagtagaactcaaagatgtgaaaggccgtgtctgctacgaagatgtctccttccattacagcgacgatgaaacgactgttctctctcacgtatcgatcgagattcctgctgggaagtcagttgcattggtcggtccatccggcggtggaaagacaacaatctgttccctgttgcctcgcttctacgacgtaactggcggacgcgtcacagtagacggacaggatatccgctctcttacattgaagagtcttagaagccagatcggtgtcgttcagcaggatgtctacctcttctccggttccatccgcgacaacattgcctatggcaagccggatgcgacagaagaagaaatcatcgaagcagcaaaatgtgcaaacatccatgactttatcatggaactgcctgatcagtacgatacattcgtcggcgagcgcggcgcaagactttccggtggtcagaaacagcgtatctcgattgcccgtgtcttcttaaagaatccaccgatcctgatccttgatgaagcaaccagtgctcttgataacgagagtgaacgctggatccagcacagtctggaagaactatccaagaacagaacgactatcacgattgcacatcgcctgtccacgatcaaaaatgcagacgagattattgttattacagaaaatggtatcgcagagcgcggaacacatgaaactctgcttgagaaaaatggtatttatgccggatattataatatgacataactgttcagagccaagcaaaatttcataaaacaggtgtaaaatgcttgcatttttaagattgtttttgaaattttatttggcggatacgccacaccgacgaaatgcgtagcattttggaggttggctctgaacagttacaatatagcataaaataagaatctcccgtagaaatcagtattttcatacttgaacttcttcgggagattcttatttttgttgtttcgggtaactattcttactcttctacttcaatcttacggattgttttctttgcaatctcatccttgattgcttcgatgaattctccaagatccttagaaccttcatctccaagatatctgcttcttacagatactttctgctcttcctcttccttcgctccaacaattaagagatatggaactctgttcagacgagcctcacggatcttgtatcccatcttctcggaacgtccatctactgagcagcggatattagcttctttaagctgtgcttccactttcgctgcataatcattgtatttatcagaaatcggaatcacacgaacctgctccggacacagccatgttgggaacattcctgcatatttctcgatcagccatgccagtgttctctcgtagcatcccacagatgtacggtggatgatgtacggacgctgtttgtcaccattctcatcgatatagtacatatcaaactgctcagcaagaagcgcatcccactggattgtgatcattgtgtcttccttaccatatacgttcttcgcattgatatcaaccttcggtccgtagaatgctgcttctccgacatcctctacgaatggaatgttgagttcctgaagcattgtacggatatgaccttctgtctcttcccatacctccggtgctccaatatatttcttagtatctgttggatcccatttagaaaggtgatatgttacatcctcttctactccgagaacctgcagacagtactgtgcaagtgcgatacaatctttgaactcttttaccatctgatctggtcttactactaaatgtccctcagagatcgtgaactgacgaacacgtgtcagaccatgcatctctccagaatcctcgttacggaacagtgtagatgtctcgccgtagcgaagtggcagatcacggtagctgtgctgctctgctttgtatacataatactggaatggacatgtcatcggacgaagagcaaatacttctttatctttctcctcatctcctaaaacgaacattccttctttatagtgatcccagtgtccggaaatcttataaagatcgctctttgccataagtggtgtctttgtacggatatatccacgttttgcctcttcatcttcaatccaacgctgcagttcctgcatgataataacaccgtttggcatgatcagcggaagtccctgtccgattacatctacagttgtgaaaagcttcatctcacggccaagtttgttatgatcacgtttctttgcttcctctaactgtgtcagatgctctttcagctcatcctttgttgcataagctgtaccgtaaatacgtgtcagcatatgcttgttctcatcacctctccagtaagctcctgaagatgataacagcttgaatgctttgattccctttgtgctcatcaggtgcgggcctgcacataagtcaacccagtctccctgagaatagaaggaaatctcttctccttccggaagatcctcaatcagttcaaccttgtatggctcatttttctctttgaaaaatgcgatcgcatcctctcttgattttgtaaatctttcgatctttgcccccttcttgatgatcttcttcatctctttctcgatagcgtcaaggtcatctcttgaaaatgactgacattcgaaatcatagtaaaatcctgtatcaatagaaggtccgattgcaacctttgcctctgggaaaagtgtctgaacagcttctgccattacatgagatgctgtgtgacgaagtactgccaatcctttctcatctcttgctgtaaggatgttcagttcacagtctttatcaagaactgtacgaaggtctacaacctctccatctacttctcctgcacaggctgcgcgtgcaagtccttcactgatgtcaaatgcaacgtcgattactgactttgcttctgaatattctttttttgatccatcttttaatgtaataatcattttcgcttcctcctattttcttcaagtaactatgcatgctttcattcggggattctatggaaaaagaaaagactctatctatcccctgcactcacatgcaagggacggataaagtctgattatcaattactttactatccgcggttccaccctttttgttttcaagatcacagcaaatgtactgctttaaaaccacttcattcatgattataacggaatcaccggaccggattggggtcactcagaggtagtcttcaaatgattcctgctaagatacttccagcaaatgtatctctctctgtaacattccacatcctactcgtctcgtcatcgtgttatcggctaagaactatgttgctttataatccttaacttcttctgaccatcattatagcattcaatcgaggattgtcaacgctatttttacagttttttcagttttttagatgatcttctttttcttgaagatcaaaatacagatcacgataatgacaatactaagtgccattaccgccggatatccattttcaagtccaggcatatctttaaagttcattccaaaccatcccgtgatcaatgtcagtgggaagaaaatcgtagaaatcactgttaaaaactgcatgttgttattctgtctattatcaatctgagactggtaagcctcttttacctgacgggcatattccaacagatgagaagtacggctcatcagacggtctgcacggtcagtaagtgttccgaagtatttcaattgatcattcaaaaacaatccattctcgttctcttcaagctcttttgtcaagtccatcatctcatcataatagcttctcagattcagaagttcccttcggattggcatcagtcggttctggatcgtatctgtatgatcctgggacacatcctcttccatacgaagaagtctacgctcataagccacaaggatctccagatcacggctcataaattctgcaatgtaattatagaggaatctctctttcgtctcaccttgatgcattcgtttcctcttgatcctactaataagtcgctctgaaaatgtctcgtcatctacgataacaacattattttcatttacaaacatgtacattcggtatctgcttcctaatacatcaagaagctttggaatgcagaaagttcctaccatacattcctgctgattctcaatcttacagaatccgatcttcgcaatctggatttcactttcatatatgatccctgctgttgccaatgtctcctccgcatgattggaatctgtgaggaacacagcaggacacttttctttctcccattcttcctgactgatctctgtcagacgttccccgaatttatagatcattctatcaccttattttctgtctgttgtacagccgcctccaactgattactactgttcactgctgctttcgcataggcttcctgatagagaagttcctgtgagttaattggctgtctcttacattctaccacagaataggttccttttgcatcctcctttcgcgcttttttgttatcacttaacatcagatcaaaaagatcctgcagacgtttctttaatcgttcagaataaactggcgctgcaacctctacacgcttcactgtatttcgtgtcatgaaatcagcagatccgatataatactgtgcctcttctccatttccgaagatatagattctggaatgttccaggaatcttccgacaacactgatcacatgaatattctctgtctcaccttccacacctgggatcagacagcagatacctctgacgatcatgtcaatcttcacaccagccttagacgcatcgattaatttatcaatgatacgcttatctgtcagagaattcattttcaggccgatgtatgcagtctctccatttttctgtttctggatctgttcctcgattttctcgatcactttagactgaaggcattttggtgcaacgagtaaatgttccatatcttcaactacttcacctttagccagtgcctggaaaactcttgcggcatccattccaatctgctcattcgctgtcataagagagaggtctgtataaagtcttgcggtcttctcgttgtagtttcctgttccgatctgtgtgatgtactggattccattttcccctctgcgtgtgatcaggcacagcttggagtgtactttataatgctccagtccgtagatgatctggcatccggcctcttcgagcattctggaccagcggatattattctcctcatcaaaacgtgcacgaagctctacgagaacaactacttcttttccattctctgccgcctcgcaaagtgcctcgatgaccttactctgttttgccagtcggtacaatgtcatcttaatggaaatgacactgtcatcctctgctgcttctgtcagcattttcaggaaaggtctgatagaatcataaggataggataacagcttgtcttcctgtgtgatctgctgtaaaatgctctgtccatccttgaattccggactcttctgcggcacgcgcttttcatagaagagctctgtatttctgcgcagaagatcctgaagctggaacacgaaagaaacatccagtggtgcttcactacggaatactctatccggagttacatccaggtatctgcacaatgcgtctacaacagtttcatccatctctctggaaagatcaatacgcaccggagagagtttctttctctgcttcatcagatcttccataaactcacgataatcaagatcctcatcataagccgcatcggcatcgatatccgcatttcttacgaccttcaataaagatttcccctttaccttgtatcccttaaagactttgccaatataatgaagaatcagatcttcaatgagcatatatcttccttttccaccgggaagttcaaccattcttgtcagcatattgttggagcatggaatgattccgattctttccttcttatttctcgtctcaagaacaacgactgcgtaaatttctccattttttaagaaaggaaatggttgtctcttgccgacgattgtcggtgaacttaaaggcatgatctccttcataaaatacttctcaagaaattttttctcctctgattttgcagaagcatgattaatcaatgtaattccgtactcttcaatcttcttcatcagcttctcataagccttatcttttctctgattcagcttcttaacttctttaatgattgcacggatctgttctgctgaagtcatctttgtcttattctctctgatctctgtactgatcagcatctgatcctgaagtgatccgacacgcacacggaagaattcatccagattactctgatagattgacacaaatgtcatacgctcgcacagcggtacttccgggttttctgcttcctccaatactctttcattgaacttcaaccaggataattcacggttcatgtatacattactcattttaattttctccatcctttaacacattttgttgccatttgcaattagcttaaatttacagtcaaggcgttctgccgctcttctgcacatgatcatacgctccagaaagatttcaaaataatccataacggtgcagatttcatcatctagctccagttccatctgaattactttcttctctttttgaattgtcaacttcgttgacagggctgcataatttaccctgtcatgtatgtcaaatgttgccggaaccggattctgtacacggtttcgtcttacatctgtcttatctgccagtatcagtgcagctgataccggatccacagcatctccggttgcctcgtcatggtgaccgattgctgtcataattaccagaacatctttcaatgacatctctgtatcctttaatatctgatatgccagcagtgcaccgctgtgtgcatgatcatgcctgttaatactatttccgatgtcatgcatataacctgcgattcttgcaagttcaatcttatgttttccatatccgagctctgtcagaatcttgcctgcagtatctgatacttttgcggcatgttttttggaatgttctgtatatccaagctcttttaaagtagcatttccctgttcgatcaacagatttatttcttctatctcccgaatctctttatatgttgttttcaaagtctttttactgcctccattgcaagttctgaacgttcgcattcttctgctgtcatcgtcaattgccagcacaatggacttcctttcatatgttctgccgcataactcagaccattggttctctcatccaggaacggacggtctatctgattcggatctcctaaaagaatgatcttcgtatcctttcctgctcttgtgataatgcctttgatctgatccggcgttgtattctgcgcttcatcaatgatcagatacgtcttgacgatcgaccggccacggataaaatttagtgcctctgcctgaatgaaacctctggaataaatttcctccactttatcccgcaatacctcttcgtctttataacgctcgtcctcattcgaatcaagcaactgctccaggttatcaaggaccgggcgcatcaacggagaaatcttttcctgttcatctcccggaaggaatccgattccttcgtcaaactgcgcattcggtctacagacaagaatctttctgtattcgcctgtcggatgattcatcaatttttccagacctactgcaagagaataaaatgtcttgcttgttccggccattcctttgacaataacaagcggtgctttctctgctggctgcatcaaagcttcctgtaagaaatactgtcctgcatttcttggagaaattccatacggagaactctttttaaattccagtttccgaaggattccatgctccactcttccaagatgtgtcttctttcttgcctgatctgatttaatgatcacgaactgattttccaaaagattaggacaaaatgctttctcattctcatctaattgataaacttcatccaccggtattccctttttcttaaaatccttaaacaattcatccggtgcataaacttcacatcttccggtatactgtctgtcatgagctatcacctgctcggaaataaaatcttctgcacacagatccaacacctgtgctttaattcgaagcaggatatctttcgtcacaagaacaacctgttcttttcttgatttctttaatccaaggcaaacctttaagattctgttatctgcgacctccagagataaatctaccggaagttcaacatctacaaaattcttttcaacccaacagattcctccattctcaagggatacaccctccagaagattccccttctgacgcagttcttcaagcagacggatacattttcttgcattggctcctgtctcgccatctgcttttttcaaatgatcaagttcttccaatacaaccatcgggagaacgaccagattatcctcaaaactaaaaagcgcatttggggactgaatcagaacattggtatccatcacataaattttaatcatataataatgccctctctgagtctttgttgtcatcttaaatacaaagctgacaacattcttttccatttttctgttctattttacaaatgctgctttacattctgatatgatttatgttaaatctatgtaaaacaaatttctctattgcgcctttcttacgcttgttttcagcttcctataaacacaaaacaccttgaagagattttttactaatacctcctcaaggtgtttcgcaatattaaacgattatctttcattcttattttacattctcaccgcactcttacacttccggcaattcttttacaaattccagtaactcttccatcgagccctgatattcagagtcgatcggaaggtttttcttattctccatcgtatctgtgataagaaatacaggaactccaagcgaacggatcgcaagatcttcctccacgtcatttccaaccatcagacactctgacggatcaagctcaaactgttccagaatttgacggaaatattccggatttggcttacaatatacatgatcttcataggttgtaataatcttaaaatcttccggatccagtcccgcccagtcgatacgattcattgttgcacatcttggaaagatcgggttcgttgcaagataaacttcaatgcctttcttcttcgcctcttttataaccatatctgaaagtggtgtcggctgtgtcgtgcacttggcctgattgaattcatcctcataaaatgcatctgcgattgcctctgattcttccacagaaagcggcaggaattcatcaatataactccagaatgcctctcggtttgttttggaaccatcatttttcaccatcgcctcatagcctttccatactgcaccaatgaatccttttggatccatttccacgcctttcttcaaatatgcctttgcaagaagcggcatataaaaacggacaaattcgtcctgtaccatcggtaaaagtgttccgtctaagtcaaataaaatatgtttaatcgccatctttttctccttctttcaatctttgtgctcttctctgattgctgatgactcttataatgtcggtcatagaataagccctttttatcataatagtaacattatactctcatatatttccttctatcaagcaaattatcattcagaacatgccacttcataaaagtttcacatttcttattatctatactgcagatactctaggaaccgcttcaccgccggagttgcaccttttctgttacgcatggcaagtcctatattacgatacgccgggatttccagttctcgtgtaacaattcgatacggaatccgtttcaagatcagttccggcaaaacactgattccaagcccactctcaaccatcgccatgatcgcgtagtcatcccatgttgtgaaatgtactttcggctttaaattacttctttcaaagatctcagaaacttctgccttagcacctttctccaatagcataaacggttcctcacaaagcgcactgaccggaatcttctgaagttctgtcagcggatgtccttccggaagcacgacaagcagcctgtcctgctccaggaaaattgtatccatctcatcccttaccggcaatcttgtgaatccacagtcaattcgcccttccatgatccattcttcaatatccgtataatcacccaaaagcatctcgtaatcaatgtttggataatttttctgaaattccttgataatattcggcagccaatgtgttgctacgctggaaaatgtaccgatacggatcaatcctgactttaacccttgaagctcatcaacttccaattgaagtttctcgtattctctgcagacccgttccgcataaggaagtaacttcatcccgctgcttgtaagctttactcctgacttgcttcgttcaagcagaactaccttccattccttttccagatcattgatcattcggctgatcccggactgggaataactcaactgttccgctgcctttgtaaaacttccacactctactgtcttaacaaatgccatgtatttctgaatacttccatccatgaatttaacactcctttcgctttacattttcccatctgttttcgctacgaaaaatctcttcacttactttatatttaattttgtcatgtaatccatgagaaacattcgcttttgtaattgataactgtatgatactataaaacagtcgaggagacaaggctggttgttaactgacatccggaaattattttaaaagatattcagcaaggagttatgtattatgggactttataataatcgaatcgtagtaaaagttggaacatctacacttaccaatgacgccggaaagagcgatcttcgtacaacagaccgtcttgcctgtgtactttctgatatccagaacatgggatatgaagttgtactcgtttcctccggagcgatcgcagtcggaagaaataaactgaacatgactgctaaaccagacagtatgcgtatgaaacaggctgctgctgcagttggacagtgtagtctgatgtatctgtatgacaagttcttcggtgactatgacaagacagttgcccagatcctgctcaatgcagatgatattgaagaagaagaaaaaaaggaaaatctgatcaatacattcaatgcgcttctcgagatgggtgtaatcccgattgtaaacgaaaatgactccgtaagctataaagaaatcgaatccgaggatcgtctcttcggtgataacgacatgctctcagctgtcgttgcagtactctgtcgcgcaaagcatctggtcattttctccgacattgatggattttatgaccacgatccaagattgtatccaaatgcacagctaatcgaccagattgatacaattgatgacagcgtctatgctttagccggcggcgcaggttcccgacgtggaacaggcggaatgcgtacaaaacttcaggccgcatcccttgccacttcccagggaacaaacacaattgttacaaacggaaagcgtccggaagttctttatgatattgtaaaaggcggaagagccggcacattattcccgggaaaaatctgattctttcagtaacatattataattaataaaaacggattaaaatcagaaaatgctttgtttttgtttcttctgactttaatccgtttcttttcatcatttctgcaactcgtttgcactatctttttgctccatctcctgtttccagtagatacgaagcttcttctcatccaatccattcacaaatcgcttcttatatacaagaaattcctccagatccatcaaaatatgatacagaagtgctcgtccttcgaactcttcgcgcgtctttggaagttcttcttgcttcatttgctccgaaatctcttccaacttctcgatctgctgatctggaatattcatctcaacaacataatctgccatatacatgatataatctgcgatcacaagtgcctgtttcggcatcttacggatcttcttgatctcataatgcaggttatgaagtacctgcagctgcgccagacgcatttcaaagtaatctatatagtatcccggatgcgaatgaaatgtattatcctggtaatcatacgctgccttgataaattcatgcattctcccctcaaaggcgatgatctgatcccagacattaatctccatatctttattatgaagatacgctgcaagttcacacaaaagaatctgtagctgattctctgtctccctcatataacgaatcagatcctgtctctgtccttcataatcatagaacaaattcagtacaatcgcgattgtgattccaatcattactaaaaacagctcattgcgaataaactccggactaaaatctcttgtcataagaaaatgtgtgccgataacggcatttaccgaaattgttgccgaccatccaagactatgactgaccgcaacgatcagaaatacatagattccatacgcaagccaggaactcgtcatatgtccaaatgtcaacgccgccagaactaccgccaaaacaaatgtcgccatacgataaaaagataatttcaccgtctcccattttgttgttaccaacgtaagcagtgtgatacttccggcagatgcctcatactccaatcccagtatatgcgctagataaattgctacactgctgcccaccgcgatcttaattgcctgcagcaggactctttttacttgtcgtgctttttccatcgtcctccctttccaattttctaacccatcatctgatttatattttatcatcatatttgcgatataatccagtgtttttttaacacatcttgtacgaaatgacgaacatgaggtgcctttgctaccatagcaatcgctcactaacaaatctagataaaactttgtttatagaaaaaggggcgattacaacctacatatgtatgtaatcacccctataacaattcaacctatttttctgttttttctgtttcttctgccttcttctcccatctttctacaaaagcatcagcataagaaagatagtattctcgaagtcccattcggatcttctgctcattattctctgcaataccttctgtgatgcggcgaagctgctctaacttctgctgcttatctcccatcttctcaattgcataagctacataaccatccatcgtcttcccctgaagctgtgacagatatggattctcaaacaaactgatgagtctttcctgataaaccatctcccactctgccttcttctctggtctcaatgcattctccatgccggaaagtatctgaaaaagctgctcgcttggagttttctcaatctcttgctcaaggaaaagcttgctctgtccatcttcttcgaattctgtctgactcgtttgttccacatttttccttcgaagcatctgctctttctttgcaactaagatcgtattctctgctgccatcgctgcaatcacatgaaatacatcatgaatctgctgtgcgctcaaaactactgcctggatatgacggtttggaagacgtaccgcaaatccctcctgaacaagattctgtaatgcctcacggatcggcattcttgaaacaccaagacgctctgcaagtgcttcctgtgccagctcttctcccggtttcataactcctgaaagaatctcctctttaattaactgcacaatgtaatcttttgtctgtactgatgccatattttcaccctctgtattttttctatttctctgcttctgtctaatcttgttttaaaagaattaattttatttctttttactttattagagaaaatttttcatctttttttataaactcgtaacaatattgtatccattttcattttcttcgtcaagatgctttttcgtatccgttctaagtttgttataagtgcgcatcctaagcggagcgttttttatatattaggaatggacatttctaatatataaaaaaccgctgctgattccagatacaactgaaatcaacaacggtctttactcttcagccgaaaatcggactcgaaccgacgaccccttcattacgagtgaagtgctctaccaactgagctatttcggcatatggtcgtcaattctgacgacctttgttattatatcgcgtttggatataaatttcaacctcttttttaatcaacttctatagacttttatcattctaataaataataactaatgatttgccatatgaactgtcaactgattatatgggatgtcaatgccttcctcatcaaaagacattttaatctcctcaaggattctccagcgcgttgtccagtaagcttctgtcttcacccaggctctaagtccgatcacaacactgctgtctgcaagttctgatatgaacactttaatctcttcatcctgaataacatcttcatccttcagtagaagattctctacgatctcttttgctttcttcagatcagattcataagaaattcctactttaagatccagctgacgttccggtcttgctgttacatttgtcagactgttacttgtcagaatactgtttggcacaacgatcgtcttattatcgattgttgtcatctttgtatagaagatctgaattacctttacagttccttcgattccctctgaattcacaataatataatctccaactgcaaatggtctgagaagaagaatcaagatacctcctgcaaagttcgacagactcccttgtaatgccagaccgattgccacaccggcggaagcgatgatcgctgctacagaagaagattctacgccaaattttgttgcgatcataaagatcagaagtgcgtataacccaaatttcaacatagaatcaacaaactgacgaactccaacatccgcattggatctctccattgatttgcctaccactttacgtataacagatatcaccttagatccgatcaggtaaaatactatcgcgaaaatcaccttcaacccaaaggcaatcagattcggaatattatcattaaaatattgtacaaagcgattcacttcatctgctgtacttgctgttacttcctgtgcagaatcaagcacatcattgacggaactgttattcgtctgcgttgctgtttgggccagtgcaaaagctgtcccctttgtcagtaatgctgttccaagttctttcactgttgtcagatacatacttttaacctccttattttaatgcaagaaatgcacacagatttcccctgttgttccccatcgtccggtgagaatataggatcttactattgcaatgtgtacaaacatttgtgattgccatatgctccggcagaattccactttccaggaagatcagctcatttgccttccataaattcaactgatattttccgttctctttcttatagaaaagatcctcccagtatttcttttcaaaagcttctttaaactgctcaattacatcctcactgacctcataacaatccatacatactgatggtcctactgctgcaagcagatcttccggtttggatccaaaattctcctgcatcagctgaacagtattttttccaatctttccaacagttcctctccagccggaatgactcagcccgattgcctttttcaccggatccacaaagtaaagtggtacacaatctgcataggaagtcacaagacagattcccggaacatttgtgatcatcccatccacatctgtataattgcgttcccgcataacaccttttcccttatcttccgctgtaaccacacggacattcgttgtatgtgtctgctttgacagaaccatatcttctacagcgacgcccattgatgctccaatccttttaaaattctctaatacccttgccgggtcatctccacgatcaaagcttagattcagagaagaataatagccctcactgactcctccaagtcgtgtagaaaaagcattcgttacaatgcccgtctcctgaaacaatggatattccagataaggagttttcttttctacttcatcaaaaatatgtgccgcgttcttataaatcaatcctaaactcatattctgtcctttcttctctatccgcaaaatgcattcttcaccagctggatccttgtcccttcaataccgatcacatcaaatctacatgggacatcactaatatgatattccgtcagataatacattgctgcctgaaatatctttctctgctttcttgcatctacagcttccagcggactccccttgccaggaccagtcctatactttacttcacagaataccagattctccccctcttttgcaacaatatcaatctctcctatgcgacagcgataattgtactgtagtatctgatagccatgctgttccagataaaaacctgctgcctgctcatagtttccacctgtcttgcggttattcttttcttttttcggatccttcatctacctgattcccctcttctaatccgtcgaactttcggatttaagaagagctgccattggcagctctttcttttatacaaccctgatatcattaaataaacttcttgataaatgtctttctatgtatcggtgtcggtccatatttcttgattgcctcaatatgttctttggatccatatcctttatggcctgcaaatccatactctggcatcactttatcatattctaccatcagccggtcccttgtcacttttgcaagaatacttgccgctgcaatagacacactcttcgcatctcctttaataatcggaacctgtggaatgatcatctccggaatcgtcacagcatcattcaaaagaatccctggttctactgccagctttgaaattgcttcacgcattgcctcataagttgcctgtagaatattagtttcatcgattctcgccggacttgccatacctactgccgctgcaaccgctttctccataatctcatcatacaactcttctctctttgcagcagacagtttttttgaatcattcagatagagaatctcacaatcctttgggagaatcactgcaccggctactaccggtcctgccagaggacctcttcctgcctcgtcaattccacagataaaactataatccgcatattttctctcgaatgttttcattacctcgaggcgttctctctcctgaacaagtgcctgctgcttcttccgatatcttgctgtcagattttttacacctgttctggaatccgtctcgtattcctgacaaagtgcttcccactgttgttctcctgcctgttcaaattctatcttgatctcgctaatacttttactcatgatgtatcaccccaatttgactcaatggccacacgcgaatccatgcccttccgatcagatcttttctatggatcaaaccaacatcggatgctctgctgtcgctgctgttattccgattatctccaagtacaaaatattcatcctcacccagtgttaatggttcttctgcaatgcccggattctccattatttcattcccataatgttcatccagacgcatcccatcaatataaaccattccggataaaatctgtactgtctctcccggcagcccgatgatccgcttaatataataggtattgtcctggtattgatatggaaatactacgatgtcatatcgtttcggatctctgaagcggtaagtcattttatcaacaatcagctgatccttatctgacagtgtagtttccatagaagaaccactgacttccgttctctgtcctacaaaagtgaccacacaccaggtaaaagcgatgatcaacacaatatacagaagccatccagccagttcttttataatttctttcataccgtattagttctcctctggaagctccagtgtaagccttccaaggcggccattacgaaaatcatccaaaagaattgccgctgctttttccacatctaattcgcttcctctgaccagacagtgtctgctttctgcaattctccttaacacttcataattatcttctgaagattctatcgtgtacttctcttcaagaactcccggatatgactgatttaaaaatttcacaagctcacttgccagttcttctgtctgaagaatctcgtctttaatcgaaccgataaacgcaagacgcaaacctactgtctggtcttcaaacttcggccagagaattcccggtgtatccaaaagttctacattcttattcagacggatccactgttttccctttgtcactccaggcttatttcctgtttttgcacaggcttttcctgccagcgcattgataaaggtagattttcctacgtttggaattcctaccaccatggcacgtaccggacggttcaggattccacgctttctgtcacgttccatcttctccttacatgcttcctggatcacagactggatcgacttgattccgccgcctttcttagaattcactttcacgacagaatatccctgcttcttgaaatattccatccactcatcatttcttctgtcttccgcaagatctgccttattcaaaagaatcagtctcgccttattctttccaagctcatcaatgtccggattacgactgctgagcggcactcttgcgtcaaccaactcaataatcagatcgatcagcttaatattctcctgcatcattcttctggcctttgtcatatggccaggataccactgaaaatgcattgcattcctcctgttattttttcattctattttatctttttacaaatccgaaatgttccccggagcttacattgaaccagacctttccatagatctcatctgcctttaccactccgaccgtctcagatctgctgtcttcgcctgactcttcattgtctccgagcacaaagtactcgtctttgccaagctttatctcatcagaagctatccccgcatcttttatctctgatacatgaatatgtttcttctgctctttcccattaatataaacagttccatccttgatttggatagtctctcccggaagaccgacaatccttctaattaaaagatgaacttcgcggtttccgtctggtcgaaatgccaccacagttcctctggaaggtgtcttcatatccacgatcagacgatctacaagaacaacctctccattttcaattgccggactcatggcatctcctgcattgcttacacgatgcccgaaaaatgcaatcaaaagtactgccaccagacaaacacatagtatctctcctgcgagaatcaaagaattttttgttatatgataattcttcttttcaaactttaatttcttacttcggtttgtaaatttcagatggtttttcttcttcatctgcggcttcttctttttctttcttctgttattctttcgaaaactcagattctgccccataggttccttattttccttcccaactatgagaaacacgctccgcgagtttctcaagttatcgcggcagtcgccaaggtctcgtgcaagcacggactttggctcgttgctcgcgtaagctataagaaaagggacaatatacaagttctgtaattgtccctctcatagttactattttactaattcttttaccttagcagctttaccaacacgctgtcttaagtagttcagttttgctcttcttactttacctctgcgaacaacttctactctctcaacatgtggagaatgtaccggccatgtcttctcaacaccgattccgttagatgtctttcttactgtgaaagtctctcttgctccgccaccctgtcttttcaggactgttccttcgaaaacctggattctttcgcggttaccctctttgatcttggcatatacttttactgtatcaccaacatgaaattcaggtgcgttctcctttaactgttctgcttcgatttttctaatgatttcgttcattttgtgtgacctccttaatatttgacgttcttaacacttcacttttgtgccagaggaccatcgcgcttcttttcacaacttttgtagtttaccatatttccgggcttttttcaagtccctatttcattttttctgcttctttgcgttcccgtttcacctggcggatccatttcttctctttatccgtcagattgctctccttgagaagatccgggcgtcgctccattgtacgaaggattgactgctctcttctccatttttcaatattcgcatgatgtccggacagaaggatgggcggaactttcttccctctccactcttccggtctagaatactgcggatactccagaagattatcctgaaatgactcaaattctgctgagacatcattgtgaagcactcccggaaccagtcttgagatcgtatcgatcatgaccattgccggaagctcgcctccggtcagtacataatctccgatggaaacataatctgtcacgatttcttccagaacacgttcgtcgattccttcataatgaccgcaaagcaacacaaggtcttcctcctgagccatctcctctgccatcttctggttaaatacatctccctgtggagagagatagactacacgcagtggacgcttcttcgaattttcatcctgcaaatcactgttgcgcacttcagaacaatccgctggttccgttgacgtgacttcttccgacttgatgttctcctgctttctcttgtcgatctgctctttcacagcctcataagccagatacaccggttctgcctgcatcaacatgcctgcaccgccgccatatggataatcatccacactgttatgcttattaaatgcataatcacggatattcactgcattgatcgaaagaagtccattgttgatcgcacggcctgtaatacttgtattcacaccttgctcgatcatctccggaaataaagtcaatacatggaaattcattacagtaatccctccatcagatgcactttcatcttcttcgcttctacatcaatatccagaatacactcatgaattgcaggaagcagcacttctccgtgattctcagaagtaatgatatacacttcgtttgctcctgtctccatcacgtctttgagtactccaaagcgttcctcactgtcatctgtatagacctccataccgatcagatcaccgatataatactcgttctcttccagttcgacagcattttctcttgttacaaagagactttttcctttatatttctcaatatcattgatattatcaatgcccttgaatttcacaattacaaattgcttgaaaaaacgaacagactgaatctcaagatccaactttttccttcctgtatcaaggacaacatttttcaatgtctgaaaacgcgcagcatcatccgttgtcgggaataccttaacttcaccacgcagaccatgtgtggaagaaatcactcccacctgaagaaattgttccattcctgattcctttcttatgaaactatgagaaacacacttcgcgagtttctcaagttatcgcggcagtcgccaaggtctcgtgcaagcacagactttgactcgttgctctcgtaaaaagaaaggggcagtctcttctttatgaaggctgtcccttttttaagccctgctttaccaagcaatgactctgttacttttttctttcgtcctgatactgttcttaaacaatatcaacaacgactttcttgtcttcctttgttgctgctgccttaacaacagaacggattgcttttgcaatacgaccctgcttaccgatcactttacccatgtcgccatctgctacatgaagttccagtacagtagttctgccttcctttttctcagtaactgagacttcatccggctgatctaccagtgcctttgcaataacttcaactaattctttcatgatactcgccctccgcggagacatcgttatttatctgcagctgatcactcagctacagacattactcatacagattcgattatttctcgattcctgctgctttgaagatctttccaacaacttctgttggctgagcaccattgttgagccatttcttagctgcttcctcgtctactttgattgcgcttggctcaaggttcggatcgtatgttccgatttcctcgatgaatcttccgtctcttggagatctagaatctgctactacgattctgtaaaaaggagccttcttctgtcccattctctttaatctgatctttactgccatttttttcacctcataatttttcttaattttttgttattgtttcatttatatgtcaaaagggaagcttgaatttgcccctttttccacctttgccacccatcattccaggaagtttcttcatcatctttctggattcgttgaactgttttaccatacggttcacatctgcgatatccacacctgcacccttggcaattctgtgctttctggatggattcagcagatccgggtttcttctctcttccaaagtcatggagtagatgattgcttccatctgagccatcttcttctcattctcttcggaatcaagatcaggcatcttacctccgagattacccattccaggcagcattcccatgatgctggacaaaccgcccatcttacgcatctgttccatactgtcaagataatcttcaaagtcaaactgagctttcttcatcttatcagccatcttcttggctttctcttcatcaagctcagcgcctgccttctcaatcagggaaaggacatctcccattcccagaattcgggatgccattctgtccggataaaactgctccagatcagaaagcttctctcccataccgacataaaggatcggttttcctgtcactgccttgatagacaatgcagcaccgcctcgtgtatctccgtcaagctttgtgacgatcacaccgtcgattccaatcttatcgttaaaggaacttgctacattcaccgcatcctgtccggtcatcgcatcgacaaccaggatggtctgatgaacttccacagcttccttgatctcctgaagctctgccatcatatcttcatctacatgaagacgtcctgcagtatcaaggatcacaatattgttaccattctttgctgcatgctcaactgctgccttcgcaatatccgccggcttattcttgtctcccatggagaacatctctacgccctgcttctctgcgttgatctccaactgcttaattgcagccggacggtaaacatcacatgctaccagaagtggtttcttaccttttaacttaaactttcctgcaagctttgcagttgttgttgtcttacctgctccctgaagacctgccatcatgatcactgtgatcgcactgcccggttgaagcttgatctctgttgtctcagatcccataagcttaaccagctcttcattaacgatcttgatcaccatctgtcccggattcagtccgttcatcacatcctgaccaacagccctctcctgaacatcctttatgaagcccttaacaaccttgaagtttacatctgcttcaagaagcgccatcttaacttccttcagagctgccttaacatcatcctctgtcagtcttcccttgcttcgcaggttcttaaatacattctgaagtttttcacttaagctgtcaaatgccattctataactcctctatgatcgcatccgcaatcttacggatccgcttcaccatctcttccgggtcattcttctcgcattcccactctgcaagtgtatcatcaatcttactgaccttctccttcacggaaaggaacttctctacaagatgaagcttcatctcatatccttccagtgtcttctgacaccgcttcacaagatcatgtacaccctggcggctgatccccttcatttcagcaatctcactgagcgaaagatcttccagcgcgaactgctcataaatctccttttgatgatctgtaagcaattccccgtagaaatcaaacaataatgcctgctctaaaaacttattcattatcttcacctctgctatcatacacgaaacgcaagatggtgtcaagtgttttttctttacagtttgccatgcgataaaaaagttgatggctcacgttataagctcgcttatataagagagccggcaacttttttatcatagggcggacgcccttaagcgaaagagcttgctcttgagcttaccacatggcaaacggatgttttgtcatctcagtgtagacatctttatcactaatttagtatcaggcatataataaagaaaaaacaaaggcttttccttcatgaaatgggtaaaacaatccattcactactggtgtccggacacaaaggaacacaaatttctcggacaaaatgtcactgttgctattcttgataccggaatttctcctcatcctgattttaaaggtcgtatcctttcttttcgggatttttccagtaccactggttcttccgaaaaagttcttttttctttctctcatttctcccctctcatcgacaatagtggacacggaacccatgtagccggaattcttgcgggaagcggacttctctcttccggaacttatgccggaatcgctcccttctgcaatcttattattgggaaagtattggatcagaatggaaacggatctatcaaaaatgtcataaatggaattcaatggatccgtgatatctacacgcaattccatatccggatcattaacatttctgtaggtacacgaccggatctttccattcatcaaaaacttcttttattgaatgctgtagaatccctctgggatcttgggctcgtcgtagttgtctctgccggcaactacggacctgctcccggttccgtcacagttcccggaagcagcccaaaagttatcactgttggtgttcccgacacttttcctctgatccacacccaaaggcatcctctcaattattccggccgcggtcctacagatgactgcattgtcaaacctgatgtttttgcccccggcacaggaattgtaagctgcaatgccttttactctcaatttccaaatgctccgccttatctttccaaaacaggaacatccatggctgctcctgttgtttccggtgcaattgcctgtcttctttcaaaatacccgtttctcaccaatgcagaagtcaaattaaaacttcacacttcctgtgtacagattccgggaactgaatccggctggggaattttagatttttcccggctgctcgaataatttttgccacttcacatctttatcactacaaataatttctcatctcacattttctttttctccgcatactataacattgtaaatcaaaaaatctttcggaggatttaacaatgagtgaattaacagctacaaactgcggatgcggttgtgacaacggatgtgcaaacagctgcggctgtggcggaaacggaaatggatgcggactgaataactcctgcctgtggatcatccttctcctctgctgctgcggtggctggggtggtaatggttgtggcggatgtggtaatggctgcggcaatgacagttgtctgtggatcatccttcttctttgctgctgcggcggatggggcaataatggcttcggatgcggcggttgcggtaatggctgcaactgtggcggatgctgatatctgttccttcttccacttcagaaggggcatgcggaaaaaccgcatgccccttctggcttatcttttcaaacgattcggttttccggtaacaacactctgttccgctctcttctcgtctgatgttatcttcttttctttcagttctccaagctttttctttaacatacacttctcatcaatttcatatactgcattcccatcaataattaactttctggacattttcgttttcctttcctcttcttattattaagatatgcccctgattacaaaaggtctttaattcagtatacgcataatccgatttttcacacatctatattcatgaacaggaatatattttttctgcatttcatatatatgtatcagttcagctgaaagtcaggagggtttatttttttgaaaacaccgacgcctatgaccccctttgacgaagcaactgcttccggacttcgcatgctgaaacttttccttcctcttttcccgccagctacacagagcatgcttgccgtcttcattaaattcatcgaactgcaaaatgttcttcaccatcaggctcctgtcagttatgatgcactttctgcctgtgacttttcttctggacgaggaatagaaagtctttttcaagacaacgcagattctatttttgaccatctgtcaccttatctcacatcagaagaaaaacagctcttttctactttcaaaaacataaaagagatgatgtctatggcagatatgtttacacaattcttttcatctgctccaccttctgatgaagagccagaagacactataaacaataactcaccgaaaggagatcttaacaatggaaaactggatgaaccatcctgcaatgaaaacgatcgatccgctcaagctggaactgatcaggacagccgcgaaacagacgaaaggaaaatctggaaatgaacttgccccggttatgctcgcacttatcacaaatgcaaaccgacagggacttcgtttcaatccggatgaagtttcattaattcttgaagtattaaaagaaggtaaaagcaaagaagaacaaaatcaaattgaccgcatgatggaaatgaccaaaaatatctttcggaaacattttaaataaaatcagaatcactctcttcgcctttgcagtcttatttctcttcttttctctatacatttccatctgcatcagttaaaatacaaaggatgacttgtctggaaacagacattatttataaatggagaacgatatatgcagaatattaaattaacactccaatatgacggtacacgttatcttggttggaaacgcccggaaaaagaccacaatgatcgcacagtatcttataaaattgaaaatgtattagaaaaagtaacaggaactcctgtcactttattttccggagtccgaacagaaccgggagttcatgctcggaatctcacagtcaattttcttacggaaagccaactgactcctgcagaatttaaaactgttctgaaccagtatcttccacaggatattgccgttttagatgcagtatcaacacccgaacgctttcgagcagacttaaatgcacgcgagatcacttatgaatatgccatggatttatcaccgatctatgacctgttccacaaaaactatcgcggtcgattaactgatctgttatcagattcattatttgatctgccacctgaacaaacagcagaacttccaaatattcttcttatggaaaccgctgcccactcattacttggaacgcatgattttaaacatttctcttcgattcgaaaaaagaaaggaaccgaaaaagaaataaaaacaattacttttgtcacagaagagtctacgctttatattcgtatgacagccaatgattttctctatcagatggctccatttattctgggaacgcttttggatatcggcatagggaaaagacccgtcgaatgtatcaatgcgatcctgaaaggaaaggaaaagccttctgcatcctgcgacacaaaaggcttgatcttatacgatattgtttattaatttttgagtaatacgaaaaagactctcaatttccatattaccgaggtggttttacattgtcttaagtgcaacacttaaaatatgtttcgcacagcgttgtaaatctgctttggtaatttcttttccttcgttcactgcttctacgatatcatccacattctgctgacatcccggcatctgaaggtcatttcctgctttaatgcactgtacactgctagaatgactatattttccggatggtgataccattcccatctctgttgtatcctgtgaagtataccagtctgtcatcacaagaccttcaaatccccactcatcacgtgcgatgttctgcagcatgtcatagttgtttgctgaatgaactccgttgatcagattgtaggaagtcatgatcgcatatggctgagctgtctttaccgcaatctcaaatcctttcagatagatttctctcagcgcacgctcgctgatatgtgcattcgtaaacatacgattgtcttcctgattatttcctgcaaaatgtttgattgttgttccctttcctttttgagactgaacacctttcgtctctgttgcagcacaaagacctgtcaatacaggatcctcagaatagtattcgaagtttcgtccacaaagcggattacgatgaatattcatgccaggtgcgagccatagatctacatgtaactgcttcatctcttctccgacaagctctcccattctatgaatcagattcatatcccaggattgtgccagtgttgttgcgattggaatggcagtacaaggtgtctctaaacgaagccctgccggtccatctgcctgaataagattcggcacttttcgtgtttcaagtaaactggaagtggtgtctcctgctgctcccggcacaccggaggatgctgaaccaattacatttccgtcgccatttcttctctctgttccaacacaaagttctgccatttcttccacggtaagctgcgctgtcagttcatccagagtcgcgctgcctgcttttacatcttccaacgtcagaacttcatctttcctcttatccataagtgtcctgcgcatcacttcatattctacaagttctttcttaaagttctctgcctgaagcataattctaaacggaatcgccggaacaccgaaatcaaattcaatatcgaaaatcggaatcatatggtgaagctctctgactgcaattgtatcacgcatcagacgtttcagttggagtgttgtcacctgctcatcaaggtcgatgactgccacagcttccgtattacgtgaactgtttcctacgcggatcgtgtattccccttcttccataacccaggccgcatcatatgcatcaaaagatgccatatctgtcgttgcaaatgtgattgtcacgacatctttttctcccggcgcaagcaatttagtcttagcaaatcctgcaagttcttgtgttggtttctccatgattccatccggtgcggaataataaacctgaaccacctcttttccagaatacttatcaccaatgttcgtaacctcaacttcaacctgtacctgcttttcatctgctgttacattgattgttttcatttcaaattctgtatagctttttccatatccaaagcaatatagaggcatcacaccaaacgtatcaaaataacgatatcctacatagattccatcactgtaatattcgtcgtcaagatttccatccctgtggctaaatgttgcagaggatggataatcctcataagattttgcccatgtatcagtcagctttcctgaaggaatcgtcttagcagtcagcacatcagcaactgcataacctcccatatttcctgtctgtcccacaagcataattgcctgtacaccttcaattgccttcaatgaagtcagatcaatgactccacctacattcaaaagaacaatacagttcttatagtgttctgtcataaaacggatattctgaagttctctgtcgctgagataataatctcccttctctgccctgcggtcttttccctctccggaatttctagaaattacataaattgccgcatccgcttcttttacatccgcttctgtaatctccggctgttccggttcctcaaaaggggtctcgaaggcatatagcatcgatggttttcctgttttctctgtaaattcatttaactttttcgcatacgcttcctgcgcatccgcataaagtctgtcatactgatccagccagccttctgttacaaatttaaatcctgcacgctcaagcccttgtgcaatcgaaatgttttcacgtacatttacatcaccggatcctgttccacctttgatcgtatgtcttgctcctgttccgaataatgcaatcttctttgtaccagcctgaagtggaaggactccgtcattttccaaaattaccatacactcgcctgcgaggcggcgcacttcttcctgatgttctatctcataattctgtatttcatctgtttttaacgcatctatctgtgtcatatacaattcctcttttctgtcgattattataattgtaataatagaaacgtcaaatgtccaccccctaaaaaatgttctttttcacgctgtcctctcgccttttattatttttgttaacatctaccataccaatcgattatcttccggaaatattgataattttcaataagttttttctcttttcaggttgcgtgtgaaagtttttatggtataattattcgtatgaacataggtgtcaggtttcgctatttcctgatacctttttcaaatttgactaaaggaaagagggatattttatgcagtcaaacattattgtaaccgctgtcgttgttatttatcttcttgttatgttattgatcggttatctgtcatctaaaaagattgaatccaacacagacttcgttgttgccggaagacgactcggaccgtttttaatggccggaactcttgctgctactgagattggtggaggaagttctctcggtgttgttcagcagggtatggaaagtcacggactcagtgccgcatggtacattatcacaatgggattcgcttttgtgattcttacattccttgcaccaaaattccgtgctgcgatggttaaaactgttcctgaatatttccgccgtcgttatggaaaaccttcaggaatcattacatctttgatcatgttcgttccattgatcggactgacagccggacagtttatcgcatcatccgttattctgtctactatgctgaatctgaattataaaacagccgttctgatcgtaggcgtcgttgtaacaatttatgcgatcatgggtggtctttggagtgttacacttactgactttgttcaggtattcctgatcgtgattggaatgatcatcgcacttccatttggaatgaatcttgccggtggatgggacaatgttgtagctaatgttcctgctgaaacatttgacatgtttaaaggttataatgtaatggatgttatcagtttaacaatcatgtatgttgctacatttactgtaggacaggaagctgtatccagatattacgctgcaagagacggaaaagcagcaagacagggatctgtccttgctgcaattgtaaactttatctacgcttttgttccgacacttatgggaatcatcgtacttgcactgatcaacatgggcaaattcaatgctgcggacttccaggatgttggtgcccgttatgcacttccggttcttgctatggaagcaatgccggcaattatctgcggattgttatttgcaggtatcgtatctgccacaatgtcaagtgctgactcagaccttcttggtgccggatcgatctttgcaaatgatatttacaagattgtgattaagcctagcgcatctgataaagagatcatgatcgtaactcgtgttacaatggcagctgtaggtgtttttgctactctgattgcattatttaatacttcaagtattgttacaatcctgatgtttgccttcacccttcgtgccgcaggttctttcttcccatatgttctcggacattactggaaaggagcttcccaggcaggaaccatggcttctctgatcgccggaactattgttgtagtatatctggagcatgtttccaaaggaaatctgttcggtttgcacttcaatcagccgatcgtacctggactggttgctgcgttgatcgcattccttatcttctcactggttatgcctccaaagaagcagacaacagagcttgcacctgaagagtaattttcaggaatcatataccagacataaatctataaatatactaaaacttctttttaaaaaatagcagacataagaaacagcaaggctactgccaaaagcattattattaaaatgctttcccgacagtaaccctgctgtttctatttttatttggatttctctttttgttcagatttctcttcttatttaaatcactttatgctccagccattttctgctgtggaatcgccaggtgaaaataatacttctgaccgtccagtccgcaaacattccgatccatactcccatcgggccaaatcccattacacggatcagaaatacacacaggcagaatctgcatgcccacattgtacagcaggatgtaatcatggaaaattttgcatctcctgctgctctcatgccatatgccgggataaacgacataatccatgcaagcggttttacaattgtgatccacattaccatatggaaacacatcttcgcactctccggttccataccgccgagaatcgtaattggtttcgtcagtgcaaaaacaatcacacagctcgcagccataacgatctcagcaatcacgcaaagctttttgatgtaataaactgcctcatccttccggtcagctcccagacattgacctacaattgtcatcaatccgattccgactccgataccaccgattccgttcagattctccagaatgttcgtcattgcctgcgcagcgattgctgttgttccaagtgttgatactgtggactgaatcgccaactttcctaactggaacatactgttctccacaccggatggaattccgattccaagaatcctgcggatcattctccagtccggacggattttcagataatctcgtaccacaattggctgacgatccagacgaagctctgccaatactacgaccgcacagaaaatacgtgaaatcaaagttgccagtgcagctcccgcgactcccatatggaagccccagatcataattgcatttccgacaatattcatcacgtttgataccattgagatgagcatcggatctctcgtgttctcctgtgccctgaagatcgatgccgctgcatcatacgccgcaataaacggaaatgataatgcagtgtagaagaaatagatttcagatgctctcataacatctgcttcaactgctccaaaaatcaggtgaagtaacggtttctgaaaaataagacaaaatgcgctgacagctactgatataagagtgatgataaatagtacctgtcgtgcagactcatttgcccgttctttattcccctgtccaatgtactgggcgcagacgatcgcacctccggctgccaatgcggaaaatgcctgaatcaccaatatgttaatggaatccacgagcgatacagctgagattgccgcggatcctacattactaaccatcatcgtatccgcggtacccatgatggaattcaataactgttccagtatgattggtactaaaagagcacggatcatcttgttactgaacatatgttgttgatttatgttcgcgttcatttatactcccccttatcttgttactacttatagattgtctttttacattacgacttagtatacacccggcgaatgtaaaatttctatactttaacctgtttctatttgagtacaattaaatagaactagaaaaaagatcttcatgccaaacattttaagtctgcatgaagatcttgtctcttactctttattaactattctgcttattccagaatggttgtctcctcaactttatctgcctgagcttctttcttctctgtaagctttttaattccctgaattgctacgattactccaaggataagaagcagaacagcaaagatcagctgtaatgtatttccaaggctcagacctgttgtcataaactgacctcccagtttacagattgtcattccaagtgctgtaaatgttaccgccatcataaagatcattggaatccaaagcattgctccctggcgttttgtcttcttaaggaatactgcacatgcaatcagtgcaagtactgacagaagctggtttgctgatccaaacagtggccagatttctgcatatccaacctttgcaagtaagtatgcaagtaccagtgtaataactgttgagaaatatttattggttgctactttcttgtacaatggcagattatccatatctgtgtcatcatcgataaagaattcctggaaagaaagtcttccgacacgtgcaacggaatcaagtgatgtcaatgcaaatgctgatactgcaaggttgatcagtgtaaatacaagtgaatgcggtaagccgatcacttcaaggaaatttgcaattgctcctgcaaaaatctgtggctgtgttgtcagtccctgtgctgctgcctcgccatcagcgaaggaagcaactgcgatcagtgcgattacagcaagcatactttccatgatcattgctccgtaagatacagggagcatgttcttctcactcttaatctgcttagaagcagttcctgaagataccagtgaatggaatcctgatacagctccacatgcaattgttacaaacagaattgggaacatataacttccatctacattgaagcttgtaaaagctttcaggttacaggatggatttgctacaaatactccgacaattgctgctgcaatcataaagatcagcaagtaactgttcaggtaatcacgtggctgaagcagcattgttaccggtgcgacactggcaatcagaatgtaaataaagatcaagatatgccatgtctctcttgtcagatacattgggaaataaagtccaagtgctacggctgcaacaagcataacaattgcaatagctgtgttaacccatttattcagttttgcatatttcaaaatgcagccaagtgctacggcttctacaatgaaaagcatggatgttgttgccacagcaccatttgctgctactttgcttacaactccggcatcatcggctacgaatccgttgaatgttcctgcaactacatccgcaaatgcagcaacaacaagaatacagaataaccagcagaataacagaaataatttctttccaagtttaccgatatactcttcgataatataaccgattgtacgtcctttgttctttacagaagcatacatagatgcaaaatcctgtaccgctccgaagaaaacacctccgatcagaatccacaaaagtaccggaagccatccaaagattgctgcctggattggtccgttgatcgggcctgctcctgcgatagatgcgaactgatgaccaaatacgatattcgtatctgccggcacataatctacgccgtcttccagctcataagcaggagtctttgcattcgggtcaattccccatttcttctcaagatatcttccatagagaagatatcctccacctaatacaacgatggcaatgaccatcattataactccgttcattttctttccttctttcttaactatgattcagatgcactcatcaataaatagatcgcactctgtttttatgttaagagtttagcacttcaccatgctaaattcaagaaggattttatataaattttatatttttttaagattttggataaacatattgcacaagagggtttttattggttttgttgggttgactttatactgattttatcatacctaccatcttcggcatttcagtatttacatcggcatgtaaatatgctatcctatttcaaagcatattttctaaaacatctaaattcatataaagatttcattacaggtaaatggtacctgtcaaatcaggaaattcatgcttttaaaatccattatttaaagcagaggttttctgatagagagaacttctgtgaaaatcacataaggaggtctcttagatgaaacaaaagagaaagcaattgccggaaaaacaaaaaccggcaaatggaaagctgcttcagtggcatcctgcattttatgcagacttgcagattgaattcagagaagaaacggaaaaattaaagtttgagcgggaatatctattaagttcaaagccaatggcaattgatgtgttgatcattaaaaagaagtacgtcactacactattgataatccggaagaagggatttattatgtaattggagatatcttaccgattcagattcttgtaacaaatcgattgtcaccggagagaaatctctggttatatagtttgacagatacactggaagacatgtctgtcacaaggcagcttttggaggattataaaaagaacaaagagaatcagctgtatcaggctgttatggagattatagtaaaagcaaacgagaatcgactaaaggagggaaaaagagatatgtgtaatgcgttattagaattaatgaaagatgaattagatgaaaaacgagaagaaggggaagctcttggagaaagcagaatcaatcaactgaatcttaaattatctgagcttaatagaagtgatgagattctcaaggcagcagtagacagagaatatcagaagaagttattaaacgagtttgggctttagaaactcacgtcaatgagaatctttcggaatttcaaaaaagcgaaatgaaaggtttttcctctcatttcgctttttctatcgtctgaaattccccctttattccgcatcaaaatctgtctcaaacacgccttccggtgttcgcattgtcaaaatccccaggttgaaatcttcatcctgaatcgtgatatgatactcaaaaatcacatcatcttcgaacttggataacaatacataacttccattctcttttccgtcaatctgatcacagatgtcattgtatacatcttctccggagattgctctcggataaccacttgctttaatttttgcttcgattgcttcgtataattctttcattttcttattgtcctttctgttgtcatgaatcactctattattttgaccaggtcggttcttcatctcctgtataattaaaccgtccgtcatttttctcttctagtgctttaatcatatgatatgtatactcattatacggtgtcggaattccaagttcctttcccatacggatcagtgcacctgaaaacatatcaatctctgtgtgtcttcctgcatccaaatcctgcaaagtagaataacgcgcagatggcggtactgcacttccacgcccggaagacgcctcagtcttactcagatcgattcctttcgcatgtgcaattgcttccagttctcctttcagtccatcactgattaccttcatatgcacactgtcacggtaacatccaactcccgcgccgagaattgcctgtggcagattgttacagacattcagccgaaacttgctccacatctcttctcttgcatactctgtcgcccggaaatggattccggtatccttaaacagttcttcgattgccctgatgcgatcactatcgtaaggtgcagtaagttcgccaaaaataattccgattgttgtctcaggatcaaaatgatagccatcttcttccttatgcgaagcgaccttgatcactgccggaagaagatgctccactcctactttttctgcaataatctcttcactgtctaccccattcatcagactcataattaccgtattctccgtggttgctttctgaatactttccaatgccgccgaaagtgagccatacttcaatgcaacaatcagtaaatcgacagcgtctgtttctccggggttccatacttcgggatggtatatttttccgttaattgtgcatccattctgtttcagtctctctgctcgttctccttctgcgatcactccaagctctatgtcatttctgctcgataatccccagattacataagagcctactgctccggcaccgaggactgccactttcttaattttcattcatttctccatttcttatccgatcaggacttttttgccttcaaaagcgaaaccataatgatgtattctttcctgctctttgcactatacaaagatgctgttcgcagtactttgcgaacagcaatcactcgtaagtattatacactatctttcccaaaagaaacagtactatcttactcttccatcagatccgccatctgatactttgtcagatcaacctttccatctactacttccacaccgtcttctctcaaaagctctgcctgtacatctgctccgccaaatgcaaatgctccggcaagctcgcctttcgcattcacaacacggaaacatggaatgtgatctggatctggattcttatgaagcgcatttccaactgctcttgacatcttttcatttcctgccatcttcgcaacctgtctataagttgccacatgcccttttggaatccgttttacagcttcataaattctttttgtaggactgtctgtcacaagatcatagctctcaccgatcatccgttcaatatccttgtccggaacagatccatccagaataattgtgttccaatgctctttattctgatgatatccaggaattaccgatggatacgctgcacgccagaaatccctccatctcggatccgtctttacattcaaatggatcaattcgtctttttcgtaaatccacaaaaatatcttttttcccggctttacacggatcacctgccatcgttggtctttaaaaggcctgtcttcatagctgtccgggaaagttaatccataggcagcagcttcttctcttgttttcattatatttcacctactttctgtttacactaagcataaaggatattttccaaaatgaacacccctttggagtagaatttgacacctattcttttttcttgcatattttaaacgagaatcttatatcactctggaggatttatgaaaaagaaattgatttccgtaatactcgcttctgctctgactgttggactgttatcagcctgcggttctgattcttccaaagataatgatgcaaattccaaaatcgacacaacagaaaccggctccaacacaaccaaatcagatatcagttctgctcctgtctctgtgacattgaacgaggtagcccattctatcttctatgcccctatgtatgttgccattgaaaatggatattttgaagatgagggaattgaactcactctcgtaactggttttggagccgacaagacaatgactgctgtcatctccggtgaagctgatattggattcatgggatcagaagcatccatctacacatataacgaaggtgctaacgattctgtcgtcaactttgcccaactgactcagcgcgccggtaattttcttgttgccagagaagagatgaaagattttaagtggactgatttaaaggggaaagatgttcttggtggtagaaaaggtggtatgccggaaatggtatttgaatatattttaaagaaaaatggaattgatccacaaacagacctcaacatcaaccagggaattgattttggttccactgctgccgccttttcagagggaagtggagactttactgttgaattcgagccaagtgcaaccgctttggaaatggaaggaaaaggatatgttgtagcctcacttggtactgacagcggctatgttccttacactgcctacagcgcaaagaagagttatctcgacaaacatcctgagattatccaatcctttacaaatgcgcttcaaaaaggtatggattttgttcagattcacacgccagaggagattgcttccgtgattgcccctcaatttcctgaaacagatcttaaaaccatcacagcgattgtaaaccgttattatgcacaggacacctggaaagcagatcttatatttgaaaaagagagtttcgagctgcttcaggatattttggaaagtgccggtgaactggattcacgcgctccttatgaaaaacttgtcacaactgaatttgccaaaaaagctatggaataaatcatttcttgcagaagaaaacgcattccactataataaaaaggaagccagacttctggcttccttttttcaaaaacgcaataacaaaacaaattacttttttcgaaaggacattgtattactatgattgataaaaaactgattccttacgggggacttaagaaagaaccattttcaggtacacatcacggaatgcgctatttctttcgcggagatgacggaaaaagcagcacaaccttcaccgtattcatttatccagaaccgtggtgctttgaagatacaccggaagaagagaaagaacaaaagacatttccgctctccgatgagggaatggatgaagctattgcctggcttttcgaacgctttgaaactgagaaatccaaatggttgaatgcgagccgcgatgcaatgcacattgtgaataatcagaccttctgattataatccccaaacatcttcttcatatgaacattcataatataataatacatcgcgatcaggaggcctcctgccagcacccatgcagccgggctggccaggcaaacaccaagataacttctctctcttgctgcgatccgtgctaccacacctcttccgatcagttcagcaacaccggccatcatcggcagcagtccgtaaccgagtccctgaattccatttctgtagatattcacaattgcaagcggaatgaagaaaagtccgatacatttcagatagatatccacagaactcatgataatatccacatcctctgagacaaacagataggtcatgtattttcctactgtcatgataaatgttgctgctacaagagagtaaccgataccaagaatcgtacacgccttgaaaccttgacggattcttggtacatttccggctccgatattctgggctccgtaagttgccattgttgttcccatcgctacatatgcctgtgtcacaacctgctcaatcttacttgccgcagtaaatgccgccacaagcgtagatcccaaaatattcagggcagactgaaccatcatagttccaattgccgtgatagaatattgcaatgccattggaagtccgatctttaactgaatcgcgcaaatctgcccgccaacatgccagtcttcctttttcagatgaagaagcggaatcttccacataatataaataagacagagtacacctgatatgccctgtgctactaccgtcgcgattgccgcacccggtgcgcccatctgaaatacaatgattaaaaccagatccaacacgatattcagcaacgcactgatgatcaggaaatacaatggaatcttactgtttcccagtgctcttaaaatactggataacaagttataaagcatctgcgccaggattcctccgctgacgatcataatatacttatatgcatctgcaaagatatcagacggcgtgtgcatcagatgtaacagcggtttcataaataacataaaggtaaccgtaagaaacagtccgatcaagaatgagaggattcctgcccccgcaacggtgcgccgcatcccctgcatgtctcctgcgccaaacttctgcgctgtgagaacagtaaatccggctgtcattccaactacaaatccatagatcagaaacatgattgttcctgtgcttccaactgctgcaagcgctttcgttccaacgaacttacctacgatcacagcatccgccatattataaaactgctggaaaacatttcccagaaagattggaaatgtaaaacttaagatcatcttcattgggcttccaacagtcatatcattctgtactgatttcattttgctcctccttttccgtatttatcagtgactacatacataacacatcccgtccgttgattactgttcacaagaattgtttcgtaaccaacggacgggatgtgttttcgaaaaacgtgcttattatatactagtttttccctgatgtaaatatcctgaaaaggagtttttacatttctttcaaaacgtaacgattcactcaaaaatcatctatatgggaagatgctattccaggaacagcacttcttcctccaccagctccagcgcatccggcattcctttttcccggatcttctcctgattctctctctgtacaaaccaggagatcacaggcggatctgcctcttcatttgcaggcttcagataataattatcttcgaaagggagtgctgccttactctctaatagaaatggaatctgattctttccaccttctccccagatcgggacaaaatcatgcgcacgataaccgatatagttgatattttctgggatatttctttgctctgtacacaacgtaatcccccagtctgtcagttctgcggtatgctcatccacataaactgctcttgtgaaattcttgcatccagtcagccgtgccgcttcttttctctgcggattctggaacaattctttcgtcttccctgctgccacaatctgcccctggtcgatgatcagcagttcttcactgaaccggtacacttcatctctgctgtgagacaccatgatcacagtaccctcataatcttcgagaagttcctgtaattcctgctgcagacggtccttcagatacatatcaagtgctgaaaatggttcatctaagagaatcacatctggtttataagccatgattctcgcaagggctaccctctgctgctgacctccggaaagctctgccgggaatcgtttttccagtcctgttagctgaaatttctcaatcatctcacgcacacgctttgcattctcctgcttttttccttttaatccggcggcgatattcttttccaccgtcattgtcgggaaaagtgcataattctgaaacagatagccaatgttacgcttctgcggttttaaattcactttattttcgctgtcataaactgtctttccttcaattttgatcaatccgctctccggcggctcgattcctgcaatactctttagtgtcatgctctttccacatccggatgcgccgaggattccgattcgtttagaatcacttttaaaatctatgttcagctcaaatgtattccgttttctctgaatctttacttctatcgccatctcttaccacctcttgacattcttcattttcttgcccgagatcagattcatcaggaagatcaccaggaatgcgatcaccatgacaatcgcaacccacacgcccgctgtcatatagtctccgtcctgaatgaccattgcaatcttctgcgagattgttcctgtctttcccggaatatttccggcaagcatagatgtcgctccatattctccgagtgctctggcaaatgtaagaatcgttccggatgcgattccaggtcctgcggtcgggatcactactttccagaagatttctgtatcagacatgccaagtgtccttcctgcatagatcaaattcacatcgatctgttccatcgctgcacgggcatttctgtacatcagcggaaatgaaattactgtggcagcaatgatacatccaagccatgtctgtactactttgattccaaaattttcaaataaaaagattccaaacggtcttctcctgctgaagatcagtaacagaaagaagccagccactgtcggcggaagtaccattggcaaggtcagtattccatctataatagcctttttccccggagttgtcttcacaaccttacgtgccgcatagattccaagaaaaaaggaaaatatcgtagctacgattcccgtttttattgatataaataatgggctccagtccagattcttcaggatttccatcatttcatccattctatcattcactctcctttacaactataagaaaaaggctgtccgaaacttttcatttctggcagcctctgctgttactgttcacacgatgtgcgaccagcaacgcatctcgccattttaaatcgcctttggcgatggggcgagatgcattcaagtcaaaacacgcatcctccgtgtcaatcagcaaagtgattgacacgggagtgaacagtaaccctctgcttctatagtaacacatccgttaccatcacactatctttattctacatttgtatcgaagtaataagactcaaatactttctttgcattgtctgacagaacaaacttgatgaaatcatctgctactgcgttctgtgcatcatcagcctcatcatttactacacgtgcgatcggatagattacatttcctgtcagatcataccctactgtctgaagaatatcgagttcgtcctcgaatccatatgtatcagagtagtaagttgttccaacttcacaagatccttccactactgcggaaagaaccttgcttacgttgtcctgctcgctgatctcaagtccgccaagtgcttctgatacttcttctgttgtgattgctgaaggatcatccaccttcggaagaacacccatattcataagtgcagttcttgtatacttacctaccggtacgcttccaccggcaagtgcaaagctttctgcttcgcttaagttatcaagtcctgttacctttgttccgctgtcttttcttgtcacaactactacctggttgttaacaacattcgctcttgttccgtctactacaagaccatcggactcaagctggtccatctgcttctgtgctgctgaaaagaagatatcacactcatatccttcttcaatctgtgtcagaagtgtacctgaactgtctgcattgtatgtgatctttacattcggatgttcttcgttgtactgtgctgcgagttcgtccattacattcttcaagctggctgcaataaatacctggatctctgtttcttcttcatcactgactttgttgtcagttgcttctgtttttgctgtgtcgtctgtcttttcgtcggctttggatccacatccagccatagaaaacaccattacggctgccatcattgctgctaaaattctctttttcatcctatctcctcctgacaggcgccttgttcataaaaatgttgtaattattcctgtcttttctttataaatgatggtcttattataaccgatttgttttattttaacaatcgcttttcttgaaaaagttgcgatttacgcaacttttttcattaactgtattttaataatgtcatgtgaccgcttttttcgctaatattagctttcttcttttcacatattgcgtgtaaaagacagatcaagattcaaatatatccttatatctcttctctgcatatttcgccacatctttttccaacagttcatattttctgagtatgtctttccctgcttcgcttacactggctacaccgccatgcttgcctcccggacttcgctctacgacggtatatccgagttctttctctgcacttctgatcaggctccagcccttgctgtaagacattcctgtctttgcacaggcgtctcttaccgaaccaagtgtatcgatctgacgcagaaggaatacaattcccggaccgaagaagttctcattcttctccaactgaagcttcactctcggacggatttttctctccttttccttctctttgaaaatctcacggaaagattctccctgtccggagtaaatcgctacaccgttgtcttccaccggaacgaaaatgcgttctacattcagcgcatccatggcgcctttaagtccaccttcaccttcataagaagcaaactgatcgatcatactgcgatccatcaggatcggatgtccttttcgttcttcccagacaggtacatagactttctcctgatcgttttcattttctttcgctttttgcatcaacacacgtacggtatcttctgtgaaaagagaaactcctgccggacagaagaagaatttctcacagcgcggtttcaggtagttcatccctcgaactgctgacgtgatcatctcttccttctcataatcttcactgcgaaggaatactgcaccaagcttcgccagtttcttctccacctgctccgcctggtatcctgtgatcagcacgatctcatccacgcctgctctcttgaaatttaaaatcatctgacgcagaacctggattccatccaccgacttcatcttatcataactcttatatccaccagattttcctgctgccgcaatcactgctcctacccgcatttgcattctcctttcagctcaccgctgctatttttattactgttcacactatatgcaaccagcaattctatcattatgccgttccgagatcttctttgcgatcaatatcctgaagttctcccgcctgtaccggcacaattttcagcgaatctaagttttctttcaatatcttctttccaccgatatctccatctaactccaaaagtttatcaaagaatctcttatcccacaagaccggattgccatttcttgttccttctcctgcactaacgatctttcccggattatgaaatgctgtatttatgattctctgaatcgtggatttttttaatcttggctgatcgcagacactgaacaggactcctcgaagcggtgttccattttcatccgcatcctcgattgcctttgtcagaccgagctttacagaaagagagattcccttctccggttctttattgcataccaccgtgcagcctgctgactctgctgaaagtgtaatctcttcttttcctgtcactacataagacttgaatccctgaaatgcttcaaaccggctgatcgcactttcatacattgcttcaccttctacaactgctttcagtttatctgaaccgaaccgaacactctgacctgccgccagcaagatcaatgcgtattttcctctgctcttttcataactgcagactgcatcgagcacacctccgccgatcgcccttgctttgtctgagattgtccggcaatgctcctgctttgcacgagcatcaatatctccgatcttcagccccttcgtcacctgaacacctggctgaagcattccgcgaacgataccgtccatcagcgcataaaccggctctccgcctgtaattgcaacgatctgtccttttcgtaccagatcgccgatcacagccttcggttcgatcaccccatctgcggatgctttgatcagacgctcaatagaatatcccccaacatttcccggaactccggtattcgggatcgcacttccgtcccagatcacattacccagtgtatgtcctctctttgtctcgactacacaattacaatcttctccagcagtaaatccaggtccgactccgatcacaaatggtgcatctgtgatctttgttccgagatttctcttttcaaggatggcatccacgatcacatccggctgaaaccactgtatacattctgcctttggatcaacgatcacagggatatctccctgttccataatctcctctgcttcttcctgattctttgccaggcgcgccgtcatatcttctacaactgcctcaccttcataaaccgctctggaaaatgcaactagtctgcggaccgtcaatggcacagcaatatctgtcatcatgatctgatgccctgcgccatataatctggatgcgattcctgttgccaggtctcccgcacctttaatcaatatcttcatctcaatacttcccatctattttcctgagaatcttctatgattctccgttattttctaatttatttacgttcaagaataatctctgcactttttctacaatatttattacagcatataagatgtcacaaatatattcttgattccattctcatacaagcactttgcaatcttacacgctctgtctcgccgctcctttgtatctgccttattcagtacaacaatatactctacctgctttggacagccttttcgaccgccctgttcatgacaggcaagctttattatgtcctcttctgtcacctgatcttccggctgttttccaagaagctctgccgccttttcacttcgaaagcagatttcttccaacttttgatccaaagcgtccattccataaacagaaaatacatgtgttgtctgtggcaggagcacaggttcttgttctcccggtacttttaacggcagcatccttgctccgtccgcttcaacaagtaatggcacattccagctttctatctctgccagaatcaactccggaacgcagctcattttcccttttttcgctcttgccccaatccaggcctgtccgtattgctcaagacattccttcactcgttcaagcagctcgttccctttactaatccactcttcctcttcagccacacaactccatggagtcgtctcttctctcatatgagttgttgtaagaacaattgcctttttccccatcagcgcatactcttctgcaagccttctcaatgtagaggtctttcctcccgcaccgacagcagctatcatcggacattctgtatagtcaggctttactaccgataagaaagagtctgcttcacaaagtctgtcatctctgaaatagcttatcattttacagatcccttctttctatatttctgcgtcttttgaaaagaagatagcccacaggcagatgcctgtgagctatctatctcacatattatcactctggtctcactcaatttccaccggagcaatctcacataaaccttctgctattatcttaacagatatgtgtagtccttgcaaacagtctccattactttctgaagtgcttccggaatctttgtctcttctccaaatgtccagtcgaggatctctccacagaaacgaaccttgcagtgtactgcatctttgtccagtactgtgaatccctgattcttgctgtctgccatatcgttctcgtccatgaataatgtgaatttatccaggtacggagcactgtcgtacggacagaagctcttacagttaccacattcattacacatgtaatccacatggatgatctgatgtttctccagtcccggaaccttgattgctacatttgctctgttcgggcaaacttccttacagttctcacagattcccgcacagttaagacatctcttagcctctgtgctgtcttcgcgtacgtcttcgaggttaccctttctctcgtatacaacagcttcatctgtctctgcatcgaaatctcttacaagagtctctccgatcactgcctgagcagctttgagaccatcacggataccttctactactgtagccggtccgccaagtccgtcaccaacaacgtaaacgttctctacgtttgtctctaatgtctcttcatttacaagagcacgtcctctgtcatttacgttgattccatttgcctcgtaaaaagcagtcggaactttttcaccaacagctgcgatcactgtatcagccgggatctctttgagttctcctgtcttaacaacgcctcttcttccagaagcatccatatcgccaagaaccataacttcgcagatcagttttccattctcaagtttaacaggagaaaggagttccatgaattctacgccgtcctctactgccattaccagctcttcttcgtctgccggcatatagcgttttgttcttctgtatacaagatatacatgttcaacgcctgttgtacgttttgctgctcttgctgtatccattgctgtgttaccaccaccgataactacaacgttcttaccgatatcaagttttccgtcatttgccttgaagtcagccaggaactcgagtgcattcttagcttcaccctgctcaagtcttaataccccaggctcagaagctcctactgcaaggatcactgttgtaaatccttctgctttcagtgctgctgtatcttttacttctgtgttcagacgaacttcaacgcccatcttctcaagaagtgctgcatctttatcaatagatgttccaggaattctgaattctgggatcacgtggcgaacaacaccgccgagagcgtcgttcttctcaaatactgtaactgccattccggctctgcgcaggaagtaagcagctgccataccagccggtcctccaccgatcactgctgccttaccttcttttgtgattgcaggtgctgtcagcttgttcatcagtgcttcgtatccgttctgagctgcctcaagcttcatctcacggatatgtaccggtgattcatagaagttacgtgtacatttgcccatacaagcatgtgcacagattgttcctgtaatgaatggaagtggattcttctctgtgataacatccatagcttcttcatatttaccagcttctacaagctgcagatatgttgtgatatcctggtggatcgggcatccttctttacaaggagcgatgaagcagtcgatcagcggaacctgtttgttgatctttctggacggaagcggttttacagcctttacatgatatgggcttgtctttgcttcctcaaccagtttctctgtcttggcagcgtcgatacctgtgaatacaacgccttctttctcaagaagtcctgcaatttggcaaagtctgtcatatccgcctggtttcaggattgttgtagccattgttaccggccagattcctgcatcgatgattccttcgatgttatggaaatcagcaccacctgaataggagattctcagttttccaccaaaatctcttgccagcatatttgctacggagatggaaagtgggtacagagattttcctgacatatacatctcttcacttggaagttcgttctgttttacatcaaccgggaatgtgttagtgatcttcacaccaaactccaggtttctttcctgacagacagcgatcagtctgttcagcatcggaacagcatcctcgtactgcaggtcgtctttgaagtggaagtcaccgaatgcgatataatcgtatcccatgtcatccattgtctttcttgcatactcgtatccaagaagtgtcgggttacatttgataaatgtatggaatcccttttctgtgatcagatacattgcgatcttctcaatttcttccggagggcatccgtgaagtgtagagattgtaacagaattacagatatcaccggaaatgctttcgatatcttctgctgtcactttctcgaacaggtcaacatgctcaagaagataagccttgcagtgcttgaaaatctctgaatcctgtgcatgctgcattgtgttcaggaatgtgtcaaccttctctgatttgattccggcaagatcatatccaacgctgatgttgaactggaatccgtccatgcttccaagtccgaattcttttgagatcactttcagaaggaaccatgctttgatgtactcctccattgcctgtggaacaaacagctctgtagaccactcacagttgtagcactcgtcatcagccttgatacatggtctgttgatgcatgctgcaagctcgtctccgtccattacctgaactgtcttcagctcgaagaaacggcttcctgtgtagtaagctgcgataatattctgtgtcagctgagtgtttggacctgctgccggtccgattggtgtctcaagatcgcgtccgaagattgtgcggttgaacttgctgtccgcatgatatggatgacgctctccaaatactgttccattctctttgtactctgtcaatgtccagtttaaaagctgttcaaatgacataggtctcataatttcactcatactttttacctctctttttttcttttatcacggaaaacctgccatcggcaggttcttccgtaatgattaaatctttgaaatcactgacagattattccccaagaacctgtcttttctcaaagatctgtttccttctattttgcctccggctttggatctttcggaagaaccagattcaaaataactgcaaaaattgtcgccagtacaaccggtgatgatgcaaatgtgttattgatgatggactggaagttctcaagtcccattgtcattcctaatccatcgtaaattgttgatgtcatctgatttaagcatccgttacttaaggatacacccataccgattgcaatagataatcctgcaactgttgtatttcttgtagacataccttcacttacaagaagcttgatacctgtcattgcgatacctgcgaatacagatgctactgctccaccaagtacacactgaggaattgttctcagaagtgctgagaatttcggaatcagtcctgcaatcagaaggataaatgctgaaagtgaaaatacttttcttgctacaacttttgtagaaccaacaatacctacgttctggctgtaagttgctgtcggaggacatccgaaacatgcacttacgatattactgataccataaccgatgataccaccgttgagttcctggtcagtaggaagacgatccataccaccacttgttgtagcggagaaatctcccattgcctgaatggaattgacaaggaacaaaatcgccagcgggataatcgctgagatatcgaatttcacaccgaaagcgaacggttgtggaagctggaaccaacctgcgtttgaaagtgctgaaaaatcaaccattccaaagcacaatgcaagtacatatccacagaccagaccgatcaggatagatgcaagtttgaaaagtccttttccgtaatggttcagaccgattacgattgccagtgttacaagggatacaagccagttctgccaggaaccataaacaagtgctgctgtctgacctctctgctctacgatcacttcatatgtgttcgcggagtttcctgccatgtagttaatggctgtcttataaagagacagaccaatcgcaaagataacagttccgattaccagtggtgggaacacctttctgatctgcttaatagtaagtccaacgataattgctacaataccacctacgatcatcgcgccaaaaatcgtgttaacgtcctgagcctgtgctgcaattgctgtcattgtcggaacataagcaaaacttacaccgatgatgaccggaagtccggatccaagatggatcttatttccatacagctgaaggaatgttgataatgctgcaaatacaagtgacatctggatcaagagacccatgtttacatttccgcctgcattattcgctgcatttgcaaccagaattgccggtgtaacacatcctacaactgctgcaagtacatgctgggcagcaagcggaagtatctgaccaaatgtcgggttaccatcccacttaaacagttcttcgtttcctctgcgaggtgcttctgatttcttttctttcattattttattgtcctttccggttagttttgacgaaatgtgcgatcaaagatactgtccacatctgttatatatgttaacattaatgaacagtatccgtcaatctaagcctaacgactattgatacgttttccaagttcggctgctgcctgtctgcagtctgccataactttcgcttcgtcaatctctgtcagtcttctgtctttcatcaatactttaccgtttgcaacagttgtcacaacatcgtgtccagttactccgaatacaaggtgaccattgatgttattctcattcattggtgtcagcggattgtaattaacaatgatcacatctgctgctgcgccttcttcaagaactccgagcttctggtcgaaataacgtcctgcaatctttgcattgttctcaaacagcattttcggaacttctccccatgctgcatttggatcgcaaaggtgatgtttatgaagaatatttgctactttgaaggattccatcatatcatgtgtatatccatctgttccaagtcctgtaaggattcctctgtgtacaagttccattgtcggagggcatccgcaggcatttcccatattggattccggattatgaacaaccattgtgtttgtatctttgatcagatccatctcatgtgggttgatgtagatacaatgtccaagcagtgtcttctccccaagaatattgaagtccatcagacggtcaacaattctctttccataatgtttcaggcagtgatgcagatcttcaattccttctgcaacatgaatatgataaccaacttcatccggtttgtttgctgctgcaagttccattgtctcatctgagattgtaaactgtgcatgcatacccatcattccggcgatcattccgctatcatccttcagtgcatgacgaataaattctgcattctccattacagactctctggccttgtcttttccatctctgtcggaaacttcataacagagacaggaacgaatccctgtttccttcgctgctctctcaatttcaaataaggaacctttgatagctccaaagcttgcatgatggtcaaatactgttgttacaccgttcttaatagaatcaatataagtagccatagcacttaaataagtatcattcagtgtcaggtttctatccagtgtccaccacattccttcaagaatgctgagcaatcctgttggattgtatccattaatagcaagtcctcttgcaaaagaactatagatatgttcatgagtattaatgaatgccggcataatcactccgccttttgcatcaataaactctgcatctggataagccttcttcaactcatctgttggtccaaccttacagattactttaccatcaattgctactgcgccctcttccatataaggacattcagggtttcttgtcacaactctaccattacctaagatcaacataattgtaacctctcctttttatgaatttctacactttgatgttgaaatgccatctgcctgttatgtgcatttcgtacatcaacgtctctgatacacatagaataacatctaaattgtctaaatgcaacaagaaatctaaaaaagttttttgttacctaaaaaatttttaggaaaggtattgactatcgtgatttttatgatattatgggattatgaagacagaaagcatgtagaaaggcaggtggacatatgcgccataccttagattttcttaagcagcttgcacacggacttgcaattcaatttggaagttcctgtgagattgcaattcatgatttgaagacaaaagatctggagagatcgatcgtgtacatcgagaacggacatgtatcgaaccgacagaccggagatggtccttcaggaattgttcttgagacacttcagtcggatccgtcaacgattcatgataagctttcctatcttactaaaacagaagatggacggatcctgaaatcgagtaccttctatataagagacgatgacggatcaatctcatacatcttctcattaaactatgacatcacagcttttacagctgcgagtacagcaattcagtctttgatcgctacgaaagacaatcttccggatcttacaggtgattcgccacggcagatcacacataatgtaaatgaacttctggatttgttgattgagcaggccgttgcaaaggtcggaaagccagttgcaatgatgaacaaagatgacaaagttgctgttgtccagtatctggatcatgccggtgctttccttattacaaagtccggcgataaagtttcttcgtatttggggatatcgaaattcacactttacagttacatgggcaaatgacacgtattaatttaaggaggtcactataatggaaactatcaaatgggcagtaaacgaaatgccaaaaacagatgactctcagcttcaggtaatgtcacttgagaatgtagcgaaagctcgcgcattccatgagagcttcccgcagtacagtgttacaccacttgtaaaactggatcacatggctgcataccttggactgaaagaggtctatgtaaaagatgagtcttatcgtttcggactgaacgcatttaaagtactcggcggatctttcgcaatggctcgctacattgcaaagcagacaggaaaggatgtttcagaacttccttacaacgttcttacatctgacgaactgcgtaaagaattcggacaggctactttcttcactgcaacagatggtaaccacggacgtggtgttgcatgggcagcgaacaagcttggacagaaagctgtagtacttatgccgaagggatcaactcagacaagactgaacaacatcctgaaagaaggagcgaaagctacaatcgaagaggaaaactacgacgaatgtgttcgtatggctaacgctatggcagagaagacagagaacggcgtaatggttcaggatacagcctgggacggatatgaagagattccagcatggatcatgcagggatacggaacaatggctaacgaggctgatgatcagcttcatgaagctggatgtgagcgtccgacacatgtatttattcaggctggtgttggttcacttgccggagcagttcagggattcttcgctaaccgctatccggaaaatccaccgaaagttgttgttgttgaagctgcgcctgctgcatgcctttacaaaggagcatgtgctaaggacggagctatccgcatcgtagacggagacatggttacaatcatggctggtcttgcttgtggagagccgaacacaatttcatgggatatcctgaaaaaccacgttgatacatttatcgcaacacctgactgggttgctgccaaaggtatgcgtatgcttgctgcacctttcaaaggtgatcagcctgttacttccggagaatccggagccgcaccgtttggaacacttgcgtgcatcatgacaatggatgagtacaaaccgctcagagagcacctcggattggatgagaactcaaaagtacttctcttctctactgagggagacactgatccggatagatacaaatcaattgtctgggacggaaatgagagataatcatttctcgcaatacaataagaagaaactgtaacaccaaaacaagattttatttcaaaaggagaagaacaatggatcttaacaaaatcaaagagtatgcaaaaggctatgagaaagacatgactgctttccttcgtgctatcgtaaaaaatccgggagaaagctgtgatgagaaagctcacgtagagacaatcgctgctgagatgaagaaagttggatttgacgaagttgtcatcgacccacagggaaatgttatgggattcatgggaactggcgacaagatcatcgcatttgacgcacatatcgatacagtaggtatcggtaacatcgataactggaaattcgatccatacgatggatacgagacagagacagagatcggtggacgtggagtatctgaccagtgtggcggtatcgtatctggtgtatacggagcaaagatcatgaaagatctcggactcattccagaaggatacaaagtaatggttgttggtacagttcaggaagaagactgtgacggactttgctggcagtacatcatcaacgaagacaagattcgtccggagttcgtagtttctacagagcctacagacggtggtatctaccgtggacagagaggacgtatggaaatccgtatcgatgttaagggagtttcctgtcacggttctgctccggagcgtggagacaacgcgatctacaagatggctgacattcttcaggatgttcgtgctcttaacgagaacgatgacgctgacgagacagagatcaaaggtcttgttaaaatgcttaacccgaaattcaaccctgactacgaagaggctcgtttccttggacgtggaacagttacaacatctcagatcttctacacatcaccaagccgttgtgcagtagcagattcctgtgctgtatctcttgaccgtcgtatgacattcggagagacatgggagagctgcttagatgagatccgtaacctgccaagcgttaagaaatacggtgatgacgttgttgtttctatgtacaactatgatcgtccgtcctacacaggatgtgtatacgagatcgagtgctacttcccaacatgggctattccgaaggatcacaaagtaactaaggctcttgagaaagcttacacaggactttacggagatcagagaatcggtgctgctgacacacttgagatgcgtcaggctcgtcctctgacagataagtggacattctctacaaacggtgtttctatcatgggtagaaacggaatcccatgtatcggattcggacctggagcagaggctcaggctcacgcaccaaacgagatgacatggaaacaggatctcgtaacatgtgctgcagtatacgctgcacttccactgtcttacgctgagtaattcagtatttgctaacgcacttgcgtgtgatcacgcaaccaattcattgaacctatggcgttctgaccggataatttccggccggaaccgccttggctaataaacctaaaaacaaataattcattttaatcaggaggattttaaagatggacgcaaaattacagggatatattgacaaactgaacgcactcaacttcaaagagatgtacaatggtgacttcttccttacatgggagaaaacagacgacgagatcgaagctgtatttacagtagctgatgctcttcgttacatgagagagaacaacatttccacaaaggtattcgagagcggacttggaatttctctgttccgtgacaattccacacgtacacgtttctctttcgcttctgcttgtaaccttcttggtcttgaggttcaggatcttgacgaaggaaaatctcaggttgctcatggtgagacagttcgtgagacagctaacatgatctccttcatggctgatgttatcggtatccgtgatgatatgtacatcggaaaaggtaacaaatacatgcacgaagttgttgacgctgtaacagaaggaaacaaggacggaattcttgagcagaaacctacacttgtaaaccttcagtgtgacattgaccacccaacacagtgtatggctgatatgcttcacatcatccatgagttcggcggagttgagaacctgaaaggcaaaaaacttgctatgacatgggcttactcaccatcttacggaaaaccactttctgttccacagggagtcatcggtctgatgacacgtttcggaatggacgttgttcttgctcatccagaaggatacgaagtattcgaggatgttgagaaaattgctgaagagaacgctaagaaatcaggcggatccttcaagaagactaacaacatggctgaagcattcaaagatgctgatatcgtatatccaaagagctgggctccatttgcagctatggaaaaacgtacagagctttatggaaacggagatacagaaggtatcaaagctcttgagaaagaacttcttgctcagaatgcagagcacaaagactgggcttgtacagaagagctcatggctacaacaaaagacggaaaagctctttacatgcactgtctgccagctgacatctcaggcgtaagctgtgaagaaggtgaagttgacgcttccgtattcgatcgttacagagatccactttacaaagaagctagcttcaaaccatacatcatcgcagctatgatcttccttgctaaattcgagaacccacaggaaatcctgaagaagctcgaagaaagaggaatgtccagaatttttgagtaagtttaaatttctcagacaaaaatagtttcatagttaccttaattagtaacttattgtacaggcctgaatctttcagacctgtacaatacctttacagtaaatacggaggatcctaaaatggaaaagaaaaaacgtattgtcattgccctcggcggaaatgcccttggcaatactcttcctgagcagatggctgctgttaagattacagcacgcgcgatcgtagacctgattcaggaaggctgcgaagtagtcgtagcacacggcaatggtcctcaggttggtatgatcaacaacgctatgatcgcattgacacatgaggatgagaaacagccaaacacaccactttctgtatgtgttgcaatgagccaggcttacatcggatatgacctgcagaatgccctgagagaagaattgttcaacagaggaattcatgatatcccagttgctacaatgatcactcaggttcgcgtggatgctgatgatccggctttcgagacaccatccaagccaatcggtaaattcctttctaaggaagaagctgatgtcatggctgagaaatatgattatatcatgaaggaagatgcaggacgcggataccgtcgtgttgtagcatctccaaaaccgcaggagatcgttgagatcggtacaatccgtacaatggttgactccggtgaccttgttattgcctgtggcggcggtggaatcccggttatgcgccagggcaaccacctgaaaggtgcaagtgcagttattgataaagactttgccagtgctctccttgccaaagagctcgacgcagacttccttatcattctgactgctgtagagaaagttgcactgaactacggaaagccggatgagaaatggcttgacgatgtgacagttgaagaagcgaaacagtatgtagaagaaggacattttgctcctggttctatgcttcctaaggtacaggcagctcttgactttgctgaatccaaacctggaagacagtcactgatcacactgcttgagaaagcaaaagacggaattcttggtgagactggaacaagaatccacctttaatattgaaaaatcgattgaataagtcaattacttaaaactcctaaaatagaaaatgaaaaaacctcagagaacggtgctgcaacacccgaacctgaggttttttcatgtgttttatatgattttatttcctctgacgtattttgctttcacttctctctcatcagcaagataaatcattctttccaaacgatctttcacactcatctgacgggaggattcaagtctgctgtcatctaatataacagcatcgaattcatatccttcttcaaaacttccgacttttccgaagaaggatccgccacccttagttgccatatagaatgcttcttctgacttcaatgccggatatttctgatcgacaagtctccagcgcatctttgacatctgaattgcatgtgccattgcccggaaaagattctctgtcgatcctcctgcgacatcacttccaaatcctacagaaagtccttcttccagataacgttttaccggtgcaattccggaagaaagattctcatttgattccggacaatgtgctacatacacaccgttctctttcattctatggatttcttcttccgtactgtatacgcaatgcgccataaccgtcggtgcatctgctccaaacagaccaaaatgatcatatgcatctccataaaactctgcatacggacaaagttcttttacccattcgatctctgataaattctctgataaatgtgactgcaccggaatctggtaacgcatctgaaccatcttcagcatatctagaagctcatccgtacagctcggaataaaacgaggtgtcaggatcggcagcgtattcttatactttttatgctgcacatccttcatccattccactgtttcttccgcagactcttgtgtaccttcacgaagttcatccggtgaatttctgtccatattcacttttccgaccatcgtgaccagaccgcttctttccagatgatccatcagaacaagtgtcgatcttctatgaattgtcccaaagacgcatgctcttgttgttgaactatgtttcaagttcttggcaaacttcgcatacgcctcattcgcatacaatacatccttgtattttgcttcctccggaaatgtattcgtctccagccactccagaagttccagatccatccctgtaccgcggaatgtatactgcggtgcatgtatatgcagatctatcattcccggaataatcagacaatctccatgatcctcaattggttcccctccaagtcggaatggaagtgtctgatagattccttctacttttccatctttacacacaagataaccgtgttcgcatatctcaaattcatctttcgtctttgtatagataatatttccttttaaaattttgatatcatccatctttcttattctccactctcaattactactatcattttaacttttttcagagcgcttattttaccctttcgagcataacttcaacaacgccgccacagaccataccttcatcctctgctgcctctgctgtcatatctaccttgcatacctggaatccttcctgctccgtacggatcatgaggagtgctttctgaataatctcactttccacacatcctccaccaattgtatcgatgatccttccatctccgcatacaagcatctttgttcctacgccacgtggtgcagaaccttttctggaaataattgtcgcaagcacttttccacactcatcttctttcagaatttcttcaagaagctcactggaatatccaccgctctttgcacgactgtttttaatctgaatgatttctgccataatagataccgcgatctcttccggtgtctcggcagcaatcttcaaaccgattggtgtgtgaactgcttcaagcacatctctctcaaacccttctgcctccagctggtcttttacgatcgcagttcttctcttactccccatcattccaacataagctcttggctttccaaggattgttctgagacagtctgtgtcatatctgtgacctcttgtaacaataacaaaccatgtatctgtatctcctttgatctttgcaagaccatcttcaaatggttcgcaatagacctggtcagcctctgctcttctcgcatcatcggcaaatttcggacggtcttctaccaccgtaacatggaatccaagcatctttcccatgcgaatgattggcatagatacatgccctgccccgcagatcaccagcttcgccggacggctgatacgctcctggaaaatacgttcaccttgttcatctacaaaaacactgtctgtatccttcggttcaccttttaacagaattttctttcctgcttcagcaccatcaatccgagtctgtgcccaaagctcttcttttgcatctgcaagttctgcctgcaactgaatgtaaaatgaattcatgttctgttctcctgttctcatattacttatataattgctcataaacatcgtcaattgtacactgaccttcacatgtctgaatcgcaatacaaattttcttgattatttcggtatcttcctcaaatatatcagagatttcttctgctgaaagtcctttttttacttttttcataacctgctcaattaatttcctttttgtcccagcttccattccctcttttatagcatcattatacatttcttcaagtgcttcacacatgttgacattcaccttcctttcatccgtctcacccggtattgacttcatatttaaaaatactttgattacctgactggtctcataatctacattctgaaagtatcttttctgtttattgatgtattcttttagttcattcttttcatgtctatattttagcatggttaatatcacttgtaaatcttccgaaaaatatttgatttcctgctcattcatgcgttctgcatcaaccaaattgattttataatttggtaaatatttctctaaaacgaccttttcctcttcgcttccttccagtcgaaacatatcataaagatcctgtggaccatcccatggatctgatccataataaaaaacaagtgaaataattggtatcagcctgtcgttctttctaaatctggatagatattctgctgccgtaagatgttccagaggttttccaattcttcttgcctgtttctgacactccattcgttgtttccacagatttcgaatctgttcttcataatccattccgtcatagagcattactttctgtggcatggcataatgaattttatcctgtgattcatttgcaagaagaacgaatgtagcattatttttccatcgcatcacaatatctcgatactttttcatatttcgtgttttccctacccgattttttatactaaccgatgccactggacttatctcttccaactcttccggccgtatcacttgctttcctttataaagaaccccgttaaataaatcagcaaaccgcttcttttcattgagccagatgttaacatttacatctgcttttcccatagacagtacctccttgtatttctttattttttatagtttcgtaattcatcaaaatggaatctcttgctgatatagccttgaatatgagataagttatccgttcagatagcgctttcagacaaacgaatttaaaagaaaaatattgtctgagattttgatgtggactaactataacaaaacgattccgttctgtcaagaacatacaacattttgctgaaaagagaaatttgcgaattcaataaaatagcacataaacacctgccccgttacaggtgtttatgtgacgttataaatacagttgacaaaatactattgaactcaaaaaattaaaagcacttttttattattattttccaaatccacaattcggataagtacatacttcgcagttcaagcaaagtccgccttctccaagcactgtgaaatcttctacacttaatctctcgcctgctgcgattctcggaagcaccaaatcaaagattgttcttcttgcatacattacgcatcccggaagacctgcaaccggaatctctcctttataagccagcatgaacattgcacccggaagtaccggcgcaccgtaagtgatcacctcatccgttgcatttctgatagataacggtgttctgtcatctggatcaacgctcatcccgcctgtacagactacaaattccgcgcccttagcgatccattcattgatcgcatctgttaccatctgagagtcatcgtcacagagtacatttccaagtacttccatgcctgcctcttctaattttgcttttacgaccggagtaaatttatctgtgatccttccatgataaacttcgcttcctgttgtcacgattccgactttcatctgatggaacggaagaattgtgaaaatcggctcttccccacagagctctttcacatgattcatcttctcttcctcaatcactagcggaacaacacgcatgcctacgatcttatctccctttttcaccgggaaattgccatgtctggatgcaagcacgatctgaccgagcgcatttacttcatttaatttctcgcgattgatcttcagaaggccgtcgcactgtgcagtcagttcgatctttccttctttcgcctcagatgcattcatatgctctccctggcatacctgacgcagtacttctgccgcatcattttcatgaagcatgccttcctgcttctcccatacatagaggtgttcttttcctacagaaagcagtaccggaacgtcctcttctgtcactacatgtcctttgcggaagaccgcatccttcacaactcccggaataatctgggtaatgtcgtggcaaagcacactgccgaccgcatcctctgttctgattagtttcatcttatcctctccttttctttccccaaatttatgccggatgctgattttccacatcctgcaatgatttttcttatcttgttctccttttctctggttttcaccacagattatactctgcaagcctcaagatctttcatccatactgccacgcaggcatcacttggcattctccagtcccctctaggagaaagtgccacagtaccaaccttcggtccatccggcagacaggaacgcttgaactgctgagagaaaaatcttctacagaatgtttccagccatttaaaaatgatctctttgtcatattcaccatcaaatgtcatacatgcaatacggaaaattttactcggctcatatccaaaacgaagcatgaaatacaggaagaaatcatgcagttcgtaaggtcctacaagatcttctgtcttctgcgcgatatctccgtccttcggcggtagaagctcaggacttaccggtgtatcaagtacatcgtaaagtacattcttaagagcttcgtcttttgtatcatccgcagcatattttacaagatggcgaaccagtgtcttcggtacagaagcattcactccgtacatggacatatgatctccattgtaagttgcccatccaagcgcaagctctgacagatcgcctgttccaataaccattccccaagtcttgtttgcgatatccatcagcacctgtgtacgctctctcgcctggcagttttcataagttacactgtgatcttccggatcatgtccgatgtcacggaaatgaacattcactgcatctgcgatcggaacctcgatcaaagttgctccgactttcttcgacatctcacaggcattctgataagttctgtctgttgtaccaaagcaaggcattgtcacagcaatgatgtctttcttatctcttccaagcatgtcaaatgcgcgtgccgttacaagcagtgcaagtgtagaatccagacctccggaaataccaacaacagcagttcttgcattcgtatgagccagacgtttcttcagtcccattgcctggatcgtcaggatctcctcacagcgctgtgcacgggtctgttcatcagaaggaacgaacggcttcttcggaaatgttcttgtcaaaaatgtctttgtctcttccacggtaaatggaacacgtaccagagtctcttcatccaatggctggaatgtcgtattctttcttctctcacctgtaattctctgaagatccagctctgagtaaataatttcatttacatatctactgctttctttcagaacggttccgttttcagcaataatattgtgtccgccaaaaacaagatccgtagttgactccccttctccggcatttgcataaatgtatccagagatcagtcttgcagactgtccggagatcagtgcacgacggtaagtgtcttttccgatggtctcatcacttgcggaacagttgacgatcactgttgcaccttcaagtgccgcctgaatactcggcgggatcggtgaccagacatcctcgcagatctcggctgccactaccagttcttccattccttctgcctggaagagaatctgcggaccgaatggaatcttctttccttcaaatgtaatctctctcactgtctgtggtcccggagtaaactggcgcatctcataaaattcaccatagtttggcaggaacgtctttgtcgtaaatccgatgatctcgccctggttcattgccgcagctacattgtaaagctttccattcacttcaagcggtgctccgacaaatacaagcatatctttatcgtttgtattttctgcaatctcaagcaatgcttttctggaagctttcagaagtacgctgtggtcgaacagatcactacaggtgtatcctgtcacacaaagctccggaaacacaagaatcttcgcgccatttttctgtgcttcttccatagcattgatgatattctgtgtattgaattccacatccgcaacgcggatatccggtgtcgctgctgcaaccttcacaaatccatttttcatctcatcttcaccccatcttctatatttgatgtcagggcaaaagccccggcaatacttatcgagcctgttttaacaattctttcaattcatctactgtatacttatatgctgtattacagaaatgacacttcacttcaatctctttgccttcatcgatcatttcctgaatatctttctttccgatactgatgattgctttctcgattctcttcttagagcagttgcaatagaactgtgccggcattgtatctgtaatttccaaatcaagtccttcaagaacctgctcaagcatctgctccggtgtatgtccgttatccagcatggatgttacggactggatcttctgaatgtttgcctccagcttattaagtacttcatcctcgataaaaggcattacctgaacgataaatccaccggcgcatttcactgtattatctttgttcatcagaactccaagtccgacagaagatggtacctgttcagacgttgcaaaataataagtaagatcctctgcgatctctcctgtctgcagaattgtctggcctgaatatggctccttgagtcccatatctttgatgattgtcatgacgccctgtccaagtgctccaccgacatcaagctttccattcttcgccggaagcatcacatccggattaaatgcatatccttttacatttcccttgctgtccgctgtcacagtcagaccttcgatctgaccggaacactgaatctggattgtcagcatgtctgtatcattcttcatcatgcttcccatcatcactccacctgtaaggagtcttcccagcgctgctgtcgcaaccggacttgttccgtgatgctctcttgcctcctcaaccaggtttgttgtcactgccacaaatgcacggatctgtgcatttcctgctgttgctcttacaatataatcattcatatcttattctcctcgtctttcttatctattcaagaattgtatccaattcatttcccggattctctggcaacgatatagattctctcgctcttctctgtcggttcctcgtgtgtaactgcgtcatatgccgcctcaaaaacaagccccgaacattctaccagctctttcatctcttctaaggtataccctctctggtaatgtgtctcctgatatctccgatacaaatcttcatttgcgtcttcctgaatgaacagagtcagatcatactcattgatccgttcttcttcataatagaaattatcccagataaaactacattcccctctgtcttctgcaatcaccgtatctcccataacttctttatacttatatacggtattaaaatcaaacaaaaagactcccttgggatccaggtagttattcaccagacggaatacttcttccagttcctccggttctgtaatatagttgactgaatcacagacactgacaattgcccttactgttccatataattcgaactcacgcatatcctgaagcagataaagaatgtccttccctgactccatacgtttctccatcgcaagctccagcatatcttctgaattatccacaccgatcatgtcatatccataatccgcaagcttctctgtcattgttcctgtgccacagcccagatccaaaagaatgccatcctctattccacggtcttttaaaagactgtgaatgtattcgccccactcttcgtaaggtacattatccatgaaaatgtcgtagaccgccgcaaaccctgtataagcttccaactgttgacctccgttcttttctgtttctacataatccattttattttaccacaaattctcttttttgacatcaaacatttctacattctattgtatttctcaatttcttatcatttttctaaaagctcctatttttatcaagaattttgaaatcttttctcattcccctctcttttttgttccaaaatctaccattttttataaaagttttacatttacaacatatttccataacatttttgcgttttattcttccttttagcactttaatatgctataatcataaagctgtgttaataaaaaattttttatattaacaaaaggcgccgctatctgttgtggggacagcaggatagcatagaaaacaaaagaaaggacattgaaaaaatggacaacaacaagaaagaattcaagccgtatattccagcggacaaagtcgttcctgagtttacggtgacagcactcttgattggtatccttctggcaatcgtatttggagctgctaacgcatacctcggacttctcgttggtatgacagtttccgcttccatcccggcagccgtaatttctatgggaatcattcgtgtgattctccgtaaggattctattctcgagaacaacatggtacagacaatcggttctgccggagagtctgttgcagcaggagctatcttcacacttcctgcattattcctttgggctgaagaaggaaagattgctttcccaagcatcctttccatcgctctgattgccctgtttggcggaatactcggagtatgcttcatggtaccgcttcgtcaggctcttatcgttgaagagcacggaacacttcctttcccagagggaactgcttgtgcagaagttcttctggccggagaagaaggtggatctaaggctggtacagtattcgcaggacttggtatcgcagccgtttacaaattccttgcagacggaacgcagctcttcccaagtgagattggacacgcattcaagaactacagcggagcacagattggtatgcaggttcttccggcacttggtggtgtaggatatatctgtggaccgaagatctccagctacatgttcgccggtggtacactcagctggttcgtacttatgccaatgatcgcactgttcggtggagatgctacaatcttccctgcatcagttacagtcaatgaattgctcactatgccaggtggtggtccgtccgctctgtggagtaactacatcaaatacatcggagcaggagctgttgcaactggtggtatcatcagtctgatcaagagccttcctctgatcgtaagaacatttaagcaggccgttggaagtatgaaaaagaatgccggatctggaaaacagcttcgtacagagcaggatcttccattcccattactgatcggagttatcattgtgatcgctgttctgatctggatccttccgatcttcccggttaacctgattggtgccctgatcatcgttgtattcggattcttctttgcaactgtatcttctcgtatggttggactgatcggatcttctaacaacccggtatcaggtatgacaatcgctactcttctctttgctacagtaatcctgaaagtaacaggtactacaggacttacaggtatggttggagccatttctatcggtggtatcatctgtatcgttgcagcaatcgcaggagatgcttctcaggacttaaagacaggattcatcgtaggtgctacaccttccaaacagcaggttggtgagatcatcggtgttgttgcttcttcagcagcaatcggattcgttctttaccttctgaatgaggcttggggatacggaacagaaaagattccggcagctcaggctacaatgatgaagatgctcgttgaaggtatcatgaatgaggaacttccatgggctatgatcctgatcggtgtatttattgcaatcgttgttgagatcctcaagatgccggttatgccattcgcagttggtatgtaccttccattctctctgagtgctggtatcatggctggtggtattgtacgtatcttcgttgagaagaaaaaaggtacagaggcagagaaaaaagcacgtacagacagaggtcttctctttacatccggtatgatcgccggagaaggtatcatcggtatccttcttgctgtatttgcagtagttaagattgattctaagatcattctgccattccacttaccacaggttggcagtctggtgctttacattgcattactcgtacttctgtacgttgtatgtatgaaagctgataaggaaaaataattcaatgaaaaagaaagacagtaaaaactatcttgactttatcccggagaagaatccggaaattgaatatgaaacaggtgaggacggtattattaccgtccttatcgaatggaagggattttatcacaagttggctcagcgcttcttccgtcgtccccgtgtaagtgaaatcaagttagacaagcttggaacttttgtgtggaactccatcgatgataaaaaggatgtacatgcaatctccaaagagcttgaagcagagtttccttctatggaacagccgttgacaagactgatcaaataccttgagatccttcatgataatcacctgatctactggaaaggagagaaacggaaatgatgcatacgattctgaaatatcttccttatgtactgctctttgcagttgctacaatgattgtctacggatggggattgtggcgtacgatgagacagggaagcgatcttgctaatatgctcagttccaaaggaatctccaaagtcaaaaagacattgaagaaaaatggtcctatgacccgcacagctcttgagccatatgtgaaagatctgacggcgaaacagccatttatgcaggaacaaatcaatgtgactaatccaagacaatttcttgattcaattcttccctatatggtaaagcaaaaaatgatcactgaggaaaaagtgaatgggaaaattgtatatcagatccgcaaggattgaaaacaaaaaggatatctgccagaagtaatgattactctgacagatatcctttttgtcttttcatctttttccacttttttctttctttttacaccaatttacacagatttatcgcatttttccttgacacgccccgctgcgtgggatacaataatctatggtaaaaacaacacaactacatcatttcggtaggtgaggttaccacagggattgggatatttgacatgcttcaagcattcgataggacccggagattgctgccgcgagattgtggagacacgattagttggtcagcaggctgtgtcgagaaggcacaacctaatgcaattgatatgccctgtgatactaaagcttgaacgatgcattttataagaagtcaatacgactccgtcattgttcaggcaatgatggagttttttgtttctcataaaaatacgaacaagggaggtgaggttatggactctggtgccagtagttaccacatatgtggctcaatagacaaaaataaaataatgcgaggtaattatcatggacaaagatatttttataaagcttctggcgcagcgcgaattcaaagctgtcagaagtattctcgatgtaatgaacgaagtggacatagcctctcttctctcaactttaagtgataaagaactggctcttgcttttcgtctcattccaaaagataaagctgctgaagtattttccaatatggacacttccatgcagacttatctagtaacaatgtttactgagaaagagctgaaagagctcttagacgacctctatatggacgatacggtcgatatgctggaagaactcccggcaaaccttgtaaagcgaattctggctaccgtcagcgcgtcagaccgtagcatgatcaaccagctgctgaactatccggaagacagtgccggaagtatcatgacaacggaatatgtagacctgcgtgaggaaatgactgtcggacaggcgatggcacatatcaagaagaccggaatccataaagaaaccatttacacctgctatatcacagaacgcagaaaactggtcggtatcgtaagtgcaaaagatttgatgacaacagatgacaatgttccgatcaaagatctgatggaaacagagatcatctccgtgtatacacacgctgaccaggaacaggttgcacagctgttcacaaagtatgacctgcttgcgctccctgttattgaccaggacggccgcatggttggtattgttacattcgacgatgctatggatgttatggtagatgaggccacagaggatatcacaaagatggctgccatcaaccctagtgagaagacatattttgaaacatccgttcttcagcatgcaaagaaccgtatcccatggcttttaatcttgatgttcacttccatcatcacaggaacgatcattacaagatatgaaaatgcattcgcagccatccctcttcttgtatccttcatcccaatgctgatggataccggtggaaactgtggttcccagagtgcaacactgatcatccgtggaatcgcactggatgagatccgttttacagatcttttcaaagtcatgttcaaagaattccgtatctctttgatcgtcggtgcttttcttgctgttgccaacggtgtacgtatctttatacagtatcacaatccaggacttgcagttgtgattgcctgctccctgatgggaaccgtaatcatggcaaagctggttggatgtaccctcccacttcttgccaagaaagtaaatctcgaccctgcgatcatggcatctccactgatcacaacactggtggataccttctcaatcctgatttactttaatattgcgacagtattattccgtttgtaatagcaaatcacaaatggatacaaaatcaaaaaacatataaataaaaaagtatcagaaacttttaaatttgcttctgatacttttttatttctttttattaattatctttccatcatactgatcgactcgattccaacgcttccgcctcggacaacttcaatgctcttaaattcttccttcatcaacttcacaactgcatcattctttgtcgcagtctgtacaaactcaaccagaagactgtcttttccgtaatcgattactttcgccttaaatgtctctgcgatctgaaagatctcaaccttatcttccggtgtacattttaagacttttacataaaggatctctttcattcttacaaatacgtctgtaaaatcaattactttaattacttcaatcatacggttaagctgcttcttgatctgctcaaatgtctcatcatcgctgactgttgcaattgtcattctggaaacggtcgggtcttctgttgttccaactgtcagactgtccaggttataacatttcccggaaaataaaccggaaatcttcgaaagtacaccaacctggttttctacatagagagaaatccatctctttttcatattattatccatatctcttcctcgctaacctatattttctgttctaatcgattaacaatccatgatcaaatcctcaagtgttccgcccggctgaaccatcggatatacaagttcttccggattgataacgaactcgatcagtgtcggtgtctttgtattcttcttcgcctcttcaaatgcagctgcgatatcttctttcttcatgacacggattcctttggctccgtagctctctgcaagcttcacaaaatccggtgtgtactccggcatctcctgcccgtttgttctgcggaaaagtgctcctgatttcaggttcgtcatactgtaacgttttccatagaacagcttctgccactgacgtaccataccaagatattcattgttaaatacacagagaatcaatggaagttcttccaatactgctgtagcaaattcctgaatgttcatctgcataccaccatctccggagattgcaataacgtccttatccggattaccaagcttcgctccgattgcagccgggaagccatatcccatcgttccaagtccaccggaagtgatcagctgcttgttctttgtaatctcaatatactgtgttgtgaacatctgatgctgtcctacatctgttgcaatgatcgcattgtcaaactgacggttaatctcttcaataatatcctgcggtcccatatccacacggttcttcattgttagaggatgttcttccttccactcggcaatctgctttctccacttcttcgtctcacagtgctctacatattcattcatcttcgtaactgcctcaagcgcatctgcaacgatcggcacatcaacatgaatatttcttgaaatagatgctgtatcgatatcaatatgaacaatctgtgcattcggtgcaaactcatgcagcttacctgtaatacggtcattaaaacgtgttccgatcgagaataaaagatcgcattcgctgactgccatgttcgaagcatatgctccgtgcattccaaggtttcctatataaagcgggtgatctgtcggaaccgcaccgcgtcccatgatcgttgtaacaaccggaacttctgtcttctctacaacttctgtaaacacttcattcgcacgggcgatattcacaccgcctccggcaagaaataacggcttctttgcctttttcagcatcttaagcgcacgttttaactgtcccatatgcacattcgtatttggcttatagccacggatattgactgtatccggataatccgcacttccaagttctgccatcacatcttttggtagatcgatcagtaccggtcccggtcttcctgttcttgcaatataaaaggcttctttaatgattcttccaagatcctctctgtttcgtacaataacaccgtatttcgtaatactgcgtgtaattcctacaatatcaacctcctggaatgcatcatttccgatcaatggtcttgctacctgacctgtaaaacatacgagaggtacactgtcataattcgctgttgcaagacctgtaacaaggtttgtagctcccggtccgcttgtaacaagacagacacctaccttacccgttgttctggcataagcatccgcctcatgaaccagtgcctgctcatgtcttggcagaatgatccgaatatcatcctgcttgtacaattcatcactgatatcaatcgtacatgctcccggatagccgaaaatggtatccacgccttcttccttcagcgctcttacaagtaatttgtttcctgaaatctgtttcaatctatatacctcccttttcaaaaaagaaagccccaagcatgaccttcatgcccagggcgaatatccagtatttaccgttcacagtacctgtgtcaacagccagatctatccatgtcatcacctgaattcagagataagcctctgtacatccacaagctgtgtactactccctgtcttcgtatttgcgtaaagcgtaaattaattataagtgttaaaaaatatcttgtcaacgtcgagttcttgatcttatttaatctatcgcatatgatttttcacagctccaactattgtatacagaaccatcattacaagattggcaagaacaacactggctcccgccggggttgccgccacataagaaagggtcacacccgcgatcaaacacaccactgagatcactgctgcgtttattatgacacttttaaatgtcctgcacactctcattgatgtcaatgccgggaaaatgatcaggctcgagatcaataatgctcccatcatacgcattccaagcacaatcgttactgctgtaagtacagcgatcaacgtattgtaaactcctgcttttacacctgttgcacgggcaaatgtctcatcaaatgtaatcgcaaatatcttgtgataaaaaacaataaacaggatgagtacaaaaacggaaagtacaaggcttaacttcacatcctccgcactcatcgcaaggatacttccaaacatataattatatacatccgtattcattcctgttgtcaatgagatcaccatcacgccgactgctagtgatgttgtagaaatcagtgcaattgccgcgtctcctttgatctttgcattcccgctgattcgaagaagcagaatcgctgctacaataacaaccgggattgctactgtaagcggagcggcattcatcgcagccgcaatcgccatggcaccaaatcccacatgagaaagtccatccccaatcatcgaataccgtttcaatacaaggctgacgcccagcaatgcagaacataatgcaaccagtgatccaacaaggaacgctcttgtcataaaaggataagacaacatctcaatcactgtatcaaacatgtgtctcacctcctaagaatgtcttgccggcacgactcttctcgtatccatctgcttttccaaagtacagcactgtttcctgtaaatgaaggatatgacttgcatattctacagcactctcgatatcgtgtgaaaccataacaactgcaatcccggattccttattgattcgactgatcaattgatagaattctgctgtcacaattggatccaatcctgtgaccggttcatcaagaagcaagagtttcttggtcgcacacaatgctcttgcaagcagaacacgctgtctttgtccacctgacagatctcggaaacattgttttgcgagatcacggattccaagcatgtccatcttctcccacgcctgcttcttatcttctgctgtataaaacggtttcatccctctgctgttcaaccggccggaaagaaccacttcataaacactggccggaaaatctttcttcacatctgtctgctgtggaagatatccgatctctgtctgttttaatccatcatcaaaaacaatcttgcctttgtccacattcttcagccccaaaagactctttacaagtgtactttttccggaaccattttctccgacaatacagaggtagtctccctgattaatctcaaaattcaagtcatgtacgaccatctgtccttcgtatccaatggatacattttcacatttgatcaacgccatcagttcagcacctcccttaatgtttcaacatttttctccataagactcagatatgtctctccatctgcaaactgctttgctgtcagattatgacagctataaaattcttttacatcagcatttgttgcttctgcaatagctttcgcaatattttcgttgctaagttccatttttaatactgttttaatattctcatcctgtactttattgattaaaaacgccattgtagctgcgcttggctctgtgtccgaagcacatcctgaaaatgctgcataataatccagaccatacgcttctgcaaaataacggaacggaaatctgtctccgaaaatcatcagctttcgttttgaatgatccaccacatcctgaaattcctgatccaattctttcaattgtgctacataagcttctgcattttcttcataatcagatgcattttccgaatcaatctcgcagagctcttctttgatctgctcgacgatcttcaccgcatttaacggagatgtccacacatgttcatcaatttcatgtacagaatgtgtttcttcctgtccatgctcttcatgatctgcttcatcctcttcatgctccacttcgtgctccgcatcatcctcgtcatgatcatgaccacgctcttctttcattccttccacatgttcctcttccactgtatcaacacagtctaccagcttcagagtctttctcccgttgtccggcattgattcaagaatatcttctacccaggcatcattctcgccgcccacatagataaacagatcactattctggatcgcaataatatcctgtggtgttggctcataagaatgtgtctcctcacccggttttaaaagcatcttaagttccacattctctcccgcgatctgacgcacaaaatcatactgcggaaagattgtcgctacaacactaatcttttcattttctactttattctgttcttttcccccgttttgctctgtctgctgcccggacattccacacccggtcagcatcattccaagaataagacttcctgcaagcagaaagtctcttactcttctcttcttcatcttcaaattcatcttctcacttttacgcttttacactttcacagcatctgttttagcaacgctcatattttgtaaaagcaaattctagatcaaaacaagtctgttcttctccctcttccgtcatcttccaatcttccatctgatccagattcgggaaataagtgtctgcctggaattcacggtctatctttgttacatatacagtatcacaatatggaagcatcatcttgtaaatgctctcgccaccgatcacataaaccttctcactcggatacttcttcaattcttctaaaagttcttcctctgagtgaacgatcactgcatctttcacctgataatttttattcttcgtaagaacaatattcactctattcttcaaaggaagtccgtttgggaaactttccagtgtctttcgtcccataactacaacatttcctgttgttttctgacgaaagaacttcatatctgatggaatgctcaccagcagtctgttctggtaaccgattccccaattattatctgctgctacgattgcctgcatacttcttctcctttacacagcgattggtatatttttaatctgcggatgtgtctcatatccttccagtttcacatcatccggtgtgaaatcatagaagtctttcacttccgggttcagccagaacttcggtgccggaagcggttctcttgagatcagttcctcaatcatcggaacatgtcggtcataaatatgtgcatctgcgattacatgaacaaactctcccactttcatgtcacatacctgcgccaacatatgaagcaatactgcatactggcacacattccagttatttgccgcaaggacatcctgagaacgctggttaagaattccattcagtgtaagcttgtcactgtctttttcctttgtcacattaaatgtcatactatatgcacatggatacagattcatctcatgaagatcctgatgcacgtaaatatttgtcataatacgacggctgtacggattattcttcaaatcgtaaatcacacggtctacctgatccatcatgccttctttatactgatgcttcacctgcatctgataaccataagcttttccgatcgaaccatcctcatcagcccaactgtcccagatatgactgtttagatcattaatattattcgactttttctgccagatccagagcatctcatccacacagctcttgatcccggttcttctaagagtcagtgccgggaattccttagacaagtcatagcgattgaccactccaaatttcttaatggtatatgccggtgttccgtcctcccatcttgggcgaaccttctcaccctctgtgcttgttccattctctataatgtctctgcacatatcaataaatactttatctgcgtaactcaactattctctccttcttgaccaatgattcttctttcatatagaaacatcacatctgataaacctataagcttctgtctgatttctacttcttctgattaatactcacggataatgctgctcacttccagaatgctaggcagtgccagaagctcttccagggcacgcttcatatatttctctttcacactctcagttacaataacaagctctgcctgatgtggctgtgtatgttcctgaacaactcttgtgatactaaccttatgattaccaaatacctctgcaactgctgcaagaacacctggttcatttgtcacctgcatacggataaagaacttattcttcacatccccaatgtcttttaccggaaggttcttataacatgtacagctgattcttccattgcagccatatgccatatttctcgcaacatcaatcacatctcccataactgcactggctgttgggaactctcctgcaccgcgtccatagaacattgcatcatctgctgcatctccatgaacaaaaactgcattaaaggaatctcttacagatgcaagcgggtgatccttatggatcatcattgggtaaacacctacttcaattccactctctgtgttatgtgctacgccaagcagcttgatcacactgtcaaattctttcgcatactcgatatctttcgctgtgatctttgtgattccttctgtaaatacgttaggaaatacgactctggaatggaacgcgatagaagccatgatcgccaccttacgtcctgcatcaagaccttctacatccgatgtcgggtcagcctcagcaaatccaagctcctgtgctttctcaagtgcgtctgagaaatccattccttcttctgtcatctttgtcaagatgtagtttgtagtaccattcacgataccgacaacttcagagatgtcatttactgccaggcactgcttcatcggacgaatgatcggaattgctccggcaactgctgcctcaaacaggaaatccacatgattctcttcagctgttgcaagaagtacatgtccctcctctgcgatcaggtccttattcgcagaaactacgttcttaccggctctgagcgcctcaaggatcatcgtcttcgccggctctataccgcccataacttcaattacgatctgaatctcctcatcttcaataatatcgttccaattatctgttaaaagagaagcgtctacaccctctctcttcttattcatattacgaacaaggatcttcttcacttccatctgagcgccgattgtcttctccatcacatcagcacgcttctgaatcagtttatagacaccggatccaactgttccaagtccgagaattgctacctttactgttttcattatggacacctctttcatctcttatttctgtgtaatttgttcttttattataaaacaaagatttacaacatccttcttttcacatctgttgtgtttagtcacagtaaccacagtatagcatgattttctttcactaggaagtcttagacttaatttttttcattttctctgattttttttattttttctgttgacattttaacgatcttgtagtaacatatttattgttcgtcggaacaataagttatgcgacagtggctcagttggtagagtacaaccttgccaaggttggggtcgcgggttcgaaccccgtctgtcgctctcaacatcttaatttcatattgattgttcattgggaacaatcctatgcgacagtggctcagttggtagagtacaaccttgccaaggttggggtcgcgggttcgaaccccgtctgtcgctctgaagcacttagatctttaaagatttaagtgcttttttcatatctaaaacgttcccctcttgccattttattttttatcaactatactaagtaacagattatgttttagaaaccaggaggaattatgaaatgaaatttatatatccagccatattccgtaagaaggaagatggaggctatgacgcacatttcccggatctcgaatgctgcgaggcatccggagaaactttggacgacgcgatcgacaatgcaaatgaagctgcaagaacatggatcactgttgaattagaagaagaagatccaatcttcccacatgtatctgatctggaagatattgaacttgctgaagatgagattgtaagaaatatttccgtaaatatccgattctacgaaggatgggacgaataaaaagctttaaaaaaggattgacagttgtctaagtgacagctatcaatcctttctttgtatttttaagtatttaatttccacactctatactgatctcattgaacttgctcaagatatcttctacctgaagttcttctttttcttttcctttgagatccatcacaactccaccctgatgcatcatcagcaggcgatttccgtattccaccgcgtagcgaagattatgtgtaaccatgatcgttgtaagctttttctcttccacgatctttcctgtcaatttcataatcagctctgctgttttcggatccagagccgctgtatgctcatcaaggatcaggaaatcaatcggcgtcatcgtagacatcagaagggcgattgcctgacgctgtccgccggaaagagatcctactttcacatccattttattctcaagtccaagtccaagctggcttaaaatctcacgataatattctttacgcgccttattgattccggaactgagaccaaagaattttcctttattgtctgcaagagacatattttcaagaatcgtcattgtcgggcatgttcccattgccggattctgataaacacggccaatcttctgatttctcttgaattctttctttgttgtaatatcttcaccgttcatcaggatctgtccaccgtctaccggaatacttccacagaggatgttcagcatagaagtcttacccgaaccattacttccgactacagagacgaattctcctttgtctacggtcaaattgaatttgtcaaacaggcacatctcattgatggtccccggattgtagtatttttcaatatttctaagctcgagcatttttcttcaccttctttctgcgttctccaccgatcaccaggatcacaaggaataataccgctgtgatcagtttcatgtcctgtggttcaaagaacttcaacgctgctgcaacacaggctttatagatcacagatccgatcagcactgctgttgttgctttcataaaggatacatttttaaataagcttgttccgataataacacttgccaaaccgattacgattgcaccggttccacttgaaatttcaaatacgcgctgctcctgacagaagatacttcccgaaagagcaacaagtccgtttgcaattgcaagtcctaagattttcacattgccctgatcttttgcaagagatgtgaccaatacgtcattatctcctactgcgcggagcagaaaacctgattttgtcttcatataaaggtctaataatactttactgatcactgcgatcacaagcacgatcacaagtactttgtaatttgaaaggccatcatggaagattccatttacggatgcattatcaaagatactgtcatctccaaagattgggacatttgctgttcctgccagtcttaagttgatcgtccacagtgctgtcatcatgataattccggataagagatctcttaccttgaattttacatgaatcagacctgtgcagactccggcaagcacaccgatcaggaatgatgccggcagtgtcaggattggatgaacgcctcttgtgatcatcgtcgctgtcagtgcggctcccagcggaaagcttccatctactgtcagatccgggaaatccaggatcttataagtgatgtataccccaagcgccaggattccatagatcagtccctgttctaaaatcgtaatataaatccccataatgtgttaacctctctgtttcaatactattttgtaatctctgtaaagctctctaccgcttcatctgcaagatcctgcggaactgtaactccaaggttttcagcaactttttcatttacatagaaacctggttctgtgattgtctcaaagttcatctcagatgcttttttctcacctttcagaatctctgctgccatcttacctgtctgttttccaagtgccacataatcaagtccttctgctgccagacatccgattttcacctgctcgatctcacttccgaacaccggaatgttctgtttgtttgctttatcaaggattgttgcaagggaagcaactactgtgttgtctgtaagatttgtcaagcagtcaacctctgtcagcagttcatctgttgcaagagagatatcggctgtctgtgcgattcctttgtcaacgatcgtgaatccatagtctccggcaagctctttatattttgcaagagcggatacagagtttgcttcgcttgttgtgtaaaggattccgatgttcttcgcatccggaagcatctcacggatcatctcaagctgtgctttgatcggaagttcatcacttgttcctgttacatttcctgcaggtgttccatcctctttcgcaagctttgctgcaaccgggtctgtaactgctgtgtatataaccggaatgtcggagttcattgctgaattataagcagcctgcgcactcggtgttgcgattgcacacacaagatccactttgtctgaaacaaatccatcactgatctgttttgctgttccctgatctgctgccgcattcttcacttctactgtcaggttcttgccttcctcgattccttcttctttcagtccttctaaaaatccctcacggcaattatcaagagaaccatgctctgcaaactgtgaaataccgattgtgtagctcttctcgctgtcgttggaagatgtctttcctgcatcagatgatccacatgctgcaaggctcattgtcattactgctcctaaaataactgctaatactctctttttcataattgttgtctcctttttctttttaaataaattctgcaaaagcaaaggagccgatttgggattcttgtcaataagctgtggatttctttttataaattaactttcctaacatataaaaaccgcctcaagcttattgcttgagacggtaataaaattcattattatcgcggtaccactcaaattgacgttcgtccactttctcacgtactaacatacgctcctgattgataacgggttcggttcccggcggttcctactcttttcatttcaggccgccctcgaaagtccattcagaatcagaatccatacagcaatcccaccacctgctgctctctgtgatctcttctaaaacctacttctctttctcatcggtttttgcttttgatgtgtcttattgtagtcgttcactttctatttgtcaagagaaattttattatattttaaatttcttttgatattgtcagaaaaatcactgcgagaacgtgtagaaaaacagcaggaaaactctgtttactgttttcctgctgaaatatcactatttattcttcaactgtttcttcctgtgccttcacagcaaggctaagctcttccagctgcttctcagaagccggtgtcggagcctctgtcatcagacaggatgcatctttgatcttcgggaatgcgatcacgtcacggatgctgtcctgttttgccataagcataacaagacggtcaagaccgtaagcaagtcctgcgtgcggcggaactccgtatttaaatgcatccagaaggaatccgaactggctgtaagcctgctcttttgtaaagccaagtgccttgaacatcatttcctggatatcatcctggaagattctgacactaccgccaccaatctcatttccgttcagaacgatatcgtatgctttcgcacgaactcttcccggatcagactcgatatactggatatcttcttccatcggcattgtaaatgggtggtgcatcgcaacgaaacgattctgctcctcgctccactcaagcaacgggaactctgtgatccatacaaaacgatactcattcttatcgagaagttcaagctgttttgcaagttcaacacggagtgctccaagagaatcccatactactttattcttgtcagctgcaaagagaagcagatctcccggctctccatccattgcctttacaagtgcatccatctgctcgtctgtcatgaattttgcaaatgaagacttcactgttccatcttcctggagtgcaacataaaccagacccttagcaccgtaatccttaacaaatgctgtcagcttgtcgatcttctttctcggcatgctgccctgtcctttggcattgataccacgaacgcttccgccattctcaagtgcgcctgtaaatactgcaaatccgcagtctttcactacatcagatacatctttcagttccattccgaaacgaagatccggcttgtcagaaccataacggttcattgcttcctgccatgtcattctctggattggaagctgtacgtctacatcaagaacttctttaaaaagtttcttaagatacttttcatttacttcgataacatcatctacgtcaacaaaagaaagctccatatcgatctgtgtaaattccggctgtctgtccgcacgaagatcctcatcacggaaacatcttgcaatctggatgtaacggtctacgcctgaacacatcagaagctgtttataaagctgcggagactgtggaagtccgtagaaagatcccggatgaatacggcttggtacaagataatctctcgcgccttccggagttgtctttccaagcattggagtctctacttcaaggaatccttcatctgagaagaactgacgtgtcagtgtcataacctgactcttcatacgaagatttctctgcagatccggtcttctaaggtcaaggtaacgatatttcagacggatatcttcttttgtctttgagttttcttcaatcgggaacggaggtgtctgtgactcagaaagtacacgaagttcgctagggatcacctcgatctcacctgttgcaatcttatcattcactgcaccggaacgtttctcaacttttccaacaacagcaactacatactctgcacgtaaagatgctgctttctcaatgatcgctgcatctgtagttccttcttcacatacaacctgtataattccagaacgatctcttacgtctgtaaatacaagtcctcctttatttctgttcttctgtacccatcccatgatagttacagtttccccgacattggctgctgagagttcaccacaacggtgtgttctcttaagcccctgcattgattcagccatggttatttacttcctttccttttttcctatatgttatcaacagaatctctgtagcactctgtaatatctgtgtatccctgttctgcaagctgctccttctggaacttcttgttcttcttcatgttcatgatcattacctgacgtcccgctgcacgctccttcttcgcaagatcaagaaccttgagcataccttccttcggcatattcttctcgatcaagaacgccttcttctctttgcttgtcggaactttgtatccacgctccatcagaagcatgacaatacgttcaaatccgatagagaatccaactgccggtgtatcctgtcctgtaaacttaccgatcatcttgtcgtagcgtccgccgccacctacagatccgccgaactcatccatagaaatctcaaaaatagttcctgtataataagacattccacgtaccagtgtcggatcaaacagcatacggaaatctgcttccttcgcactctctacacttgtaatgatcatttcaagagaatccgctgcatcttccggaaggaatccctgaagtttctctttacatgcacggacaccttctacgtctcctgtgatctccttgaagagctgaagatatttctcaacagattcctctgcatatccattttccttcaactctgctgcaacaccatcaagaccaatcttgtccatcttatccagtgtgataaatacgctgtcataatccttctcttcaaatccactgtaagctgccattgccttcaggaaacggcggtcattgatacggattgtaaagttattgaaatccagttttccaagcagggatgtagtagcaaggatcagctcgatctcagcaaggttagacggctcgccaagaatgtcaatatcacactgcataaactggcggtaacgtcctctctgtggacgatccgcacgccatacacttcccatctggagtgctttaaacggtgccggaagctcattagaatgatttgcataatatctggacagcggaagtgtcaggtcatagcggagtcctccgtctacaagatcagcttcttctttcgcctctgcaagtttcagcttctctccacgctttaagatcttgaagatcagcttctcattatctccaccctgcttactgcacaggttctcgatatgctctacacatggagtctcaatggatgagaatccaaagcttctatatgtctctttgatcagaccgatcacataatctctgatctccatctctgcaggaagaatatctttcattcctgttaccggttttttctttaatgccatagcacttctccttttcgttctatcttttcattactataatctcttgatttcgtaatgttcttcaactaaaaatataccttaatcacgagtcttatataataagtcaactccttctttaagggtttccgttatcgtctgttgatgcttctcagaatagtccctaagtttctgatgttcctccgcagacattcggattgtcacaattttatctttgatcacgtctgacttcggacgtcccatcttagccataggccttctcctttctctcacctatactattatactttcgtaatacgaaatgtcaactacttttgattctgtttatttttgttctaattgaattacctttttcgagatgatatactttatttggattaaaaaatctgaatctacgttaatttattgcgtatttaaaaacagctaaattttatgaaaggaaacaaaagacatgaataatgacagaaatacaaactgtacagatgtcgcgattaaaaatgacaaaaaatccatgcaaaagcatttaatttatagtcttatatgcattgcaattgcattaatctctttttttgcaatctcaaactgggcaacttccgctgatacatacagcaggattattaatactttgaatgaattgcagaaaaaggctttagagcttacaggtactgcaacagcacttgcagccggagcagctgcaataccaggagatgcaacaactcctattgcgaataagcttgctgatgttgcaggttatatggtgatcgtttatgctgtgatcattattgagaaatatttactgaccatcacaggatacattgcctttaaaatcttatttcctatcggatgtattctgatggcaaccggtaattttatgaaagccggatggaaggaattcatttacagaatcgggatcaaaagtatcattcttggaatccttctctggggactggttcctaccagcgtctggatgacgaataaggtgaacgaaacttatgcaaaatcctacgatatggattttacattagatgatactgaaaaattattggataaagataatgactctgcctctgctgccaacagtaacaaaacaaatgatattgaaaacaataatacaccttcttctatcaccgactttatcaacaacttaaaagacaaggtaagtgatgctgtcgataccgtcggcacagctgcctcagaaaaaatcgatgctattgaaaagggcttgaacaagattttagaaggcgtggctgtaatgattgtgacaacctgcgcaatcccagttcttgtaatgctgacttttgtatggatcttaaagagcataacgggattaaaacttccaaacattacacagcagtcaataccgaaggtttctgagatgaagcggaaaaagaaagctgagatcgatggttaggagggggcttgaaatctttcctgttcatcaactagaatacaacgaaaggacggtccacctcccggtggaaccgtccttttgttacttttttcagctatattttcacttttaatccttctcaaaaagtgctttttttcgttctatcatctcatcgatacggtcaatatactctgtaatattcttcacattttctacacggatcagatttgtttctttgccactgcttgtcttgatcttctccggcaaaacaagctttgtcgtagagccggcaccgcaggcaataattgtctggcgttcttccatgatcaaaatgttatacaccccagccttgtcctgctctgcatatccaacattctcgaagtttccggcaatgttcttctggcgatacaggtaatatggcacaagccccatgcgttctgctgacgctgctgccgcctcgaccatctgtgtgatctcagtccccgggtccattgttcttccttcctgaccgaacttcgccgcacgtttgattgcgagtgcgtgtactgtcaggctgtccggatgaagcttctcgatcttctcaagtgtatcctgcatatctgctgcatcttctcccggaagtccggcgatcagatccatattaatattatcgaatccaagctcacgtgcgaggtggaagatttgttctacatcttctaccgtatgttttcttccgacaagatccagtgtcttctgctgcattgtctgtgggttgacagagattcgggttacaggatatttgcggatcacttcaagtttttttcgtgtaatactgtccggtcttccggcttcaactgtaaactcaagcacatgttccaggtcaaaattctcccggattgttccaagcaaacggtcaagctggtctgcctcgagtgttgtcggtgttcctccaccgatgtatacagtatcgagtggttttccctgcatcagctttgctgtagttttcaattctttgatcatcgcatcaaggtaacgatcgacctgatctttccactcagcgattggtgaagagctgaatgagcagtaggagcagatgcttggacagaatggaattcctgcatacaggctatagccatttttacagtccaactgatcaagaagtgccttttcacggcatgcaatctcatacgcaatctgtgcttttttatcgccaacacaatattgttcttttagaaattcaaagatttcttcttttgtcattccctgctcgattttctgcattacaagctttgtcggacggactccggtcagcattccccaggcaagttcctgtcctgtctgctttgagagaaactgatagactttcttcgttacatcgcgtttctcttcctgcacatcttctgtctgcacgcattcttccggtgcaagggaaaagcaagtcccttccggcaaatgtatcttcaccagtggttcttgcttctcatctactgtctgcacgatatcctcttttggataaaatgcttttgtgacatggtatacgttataagtaaatttgttcttcttactttctatctttatcatatgaatggattatgctccttctcaaactgaactgatgtctcttccatatgtcccggatagatctttgtatcatccggaagtgtcataatcttctcctgcacagagcggaccagctggctgctgcttcctgtcggtaggtctgttcttccgatggaagcacagaacagcgtatctccacagaacaatctatgttcttttggtaggtaataacagcatcctcctactgtatgtccaggtgtatgaagtacatcaacttcaattcctgcgcattcgatcacctgaccgtctcttacaggctgtgctccgtggaatgcgtatttcggtccgtacatacaagaaacattcaggcggtcatcctcgatcaccggaagttcatcttcgcctgcgtaaaccggcactggaaaggctttgaggaaatcatcgattcccatgatgtggtcaaaatgtccatgtgtcagaaacaatgctttcatttctagtccattgttcttgatataattgacatattcctgcggacattctgccatatccactgcaaaacattccttcgtctcttcattggttacaatatagcaattcgttccaattgaccccagtacaatactttcaaccttcattcgttttcctccatcagcctgttgttctctcaatatcaattacattttcaatctgtctgagctttccgatcacacgattcaattcttctcttccgtgtacaacaaatcccatctccattgtcgccgtacccctcttgctcgtccgggtattcatggacttcacgtcaatcttctcttcagtaaatacctttgatacatccagcagaagtcctcttctgtcgtctgcaaatatcttcagttctgcaagatactgaccgccttcttcaagatcattatcctcccattctgctgtgatcagacgggatctctccacatcagaaagattgatgatattgatacaatctgttctgtggatcgacattccgcgccctcttgttacaaaaccgacaatctcatctcccggcaccggattacagcactttgagaagcgtactgccatatcattgattcccttaactacgattccgctctttgacttggcaatgtgtactctctgtttattcgcttctgagatcttctccaaaatattctcatccgtgatctctttcttatgctctttctcgtactcttccagcaggcggttcacaacctgaccttctttcagtccgccatgtccgattgctgcaagtactgcatcccagtcacggaatccgtactttttctgaacgatctgctgatacttcggcttgatgatatccggcagattaatccccttgctcttacagtaggcactgatcagatcctttccgcggataatattatcttctttgtattccttcttaaaccatgaattaatcttgctctttgcctgtgtgctcttgacgatattcagccagtcacggctcggtcccttggaattctgagatgtaaggatctcgattcggtctccgttctgaatcttataatcaatgttcacaagcttgccattcactctggcgccaaccatcttattgccgactgcactgtggatcgcataggcgaagtcaaccggcgtggagccgtttggaagattcttcacatccccgttcggtgtgaagcagtatacatcttcctggaacagatccaggtcacctttcagcagacttaagaactcacggttatcagacatgtctctctgccattccaggatctgacgcagccagttcagcttctcttcctgtgtgttcagtcctttcgtattgcttccacctgtctctttatatttccagtgtgctgcgataccatattccgctgtcttatgcatctcttctgtacggatctggatctcgaacggctgtccggaaggtccgatcagcgttgtatgcagagactggtacatattcgccttcggcatagcaatataatccttgaaacgtcccggaatcggcgtatacatctcatggatcacaccaagtgctgcgtaacagtctttcactgaatctacgataatgcggacagcgaacaggtcatacacctggtcaagtgtcttgttctgattcaccatcttcttataaatactgaagaaatgttttacacgtccgtatactttcgcttcaatatcagcattcttcatatgctttgatacttctgcaacgatctgctgcacaaattcttcacgttctgtcttacgtgcattcagatcatgaaccagctgattataaacttccggctgataatatttcagagaaaggtcgtcgagttctgtcttgatctttgaaataccgagacgctgagcgatcggagcgtagatatccatcgtctctcttgatttctctttctacttcgccggtgtcataaactccattgtacgcatattatgcagacggtctgcgagttttacaatgatgacacggatatctttcgccatcgcaaggaacatctttcttaagttctctgcctgggcctccagcttgtcctgggaatagttcaactgtcccagcttggtaacgccgtctacaagaagtgccacctcttcaccaaactctgctgagatctcatcgagtgtcattgtcgtatcttctaccacgtcatgaagcattccagccacgatcgtttctttgtccatctcgagatctgcaagtatgattgccacccagagtggatggatgatataaggctctccggatttacggaactgattcttatgcgcttctttgcctatctgataggccttctcgatcatcgtaatatctgcagaaggatgatacttacgcacacgagctattaaggcctgatataactcctccggatcctgataatcctctggtgcttttactgcatgtccgtccactatctccagatttttattcagatcttcatattcccgagtgcctgccatatcatcttcccccttcattcatcctgtgttctgttcagatccaacttccaaaatgcttcgtatttcgtcagtatggcatattcgacaaatgcattttagacacaaaacgccttagttctgaacaattaatatgatttagtatatcactatttttctctttttcaaataagaacttcccattcttcttcattttaagcaatttgtacggttttttcgatattatctactgataattgacaattgtaagctgaattgttcttcgtcccatgtactcattgatggatggatagtatgtaaaagacatgatctgcttcttttccatctgccgcagacagtcttccacttctccgaaataaaccgcttccatctgatttccctgctggtcctccagtctgcatttcagcacattccggttctttccgaagattcttggctggatcacacgcagtttactttctgcaaacagcggtttcccgttcccttttccaaagggctccaatatcttaagctcatggatcagctcttcattaatatatggaaatggaagccgcatatcgattgacaccttcatctgcagatcctcttctgtcagatccgccagttcattgatccgtttccggaaaacttcgacattttcctcttctaaagaaagtcctgctgccagcttatgtcctccgaacttcgtaaataattccctgcagcggctcatttccgcaaacatatcataggcttcgatcgaccgtccggaacctttcactcctgtctctccctttgtcagtacaaaggtcggacgataataacgctctttgatcctccccgcaataattccggcgatactttcgtgacactctggaagatacacgaccagcacctggtcgtccttccaggaacttgattcaatctgccggacagcttcttctacaccttcttcggtcatttctttccggctgtcatttaattctttcagatctgctgccaatgtcactgcctctctccggttcgatgcattaaggagttccagtgcacgcttggctgtatccagtcttccaccggcattgatgcacggtccgatcacaaatccgatatgataagtattcaagttcgctgtatctacccctgtacattgcatcaatgcgtgaagcccttcattcttcgttgtcttcagaagctcaagtccctttttcacaaagacacgattctctccaaccagatccatcacatcaccgatcgtggcaatcgcaacattttccatcagtctttcctgcagatgctctacctcctgctctgactttccagacactctgtacaaaacctcaaccagcttatacgctacagctgcgccgcacagccctttaaatggatactcacagtctgctctgtgcggatcgaccactgcatccgccggtggcagaagatattttttctccccattttcttccagatacggaacttcatggtgatctgtcacaacgatcgtcatcccattttcttttccgtaagcaatctcgttcattgccgcaattccattatcacaggtgatgatcgtgtctacatcatcctccagtgcacggtcgatcagcatctgattcaatccatatccgtctttgatcctgtctggaatatccgtatccacatctgccccaagtcctgcaagcccctgttgcaaaatatacgttgcattgactccatcaatatcataatcaccgatcacacggattttctttccttcttctattttctccttaagaatatctaccgcacgatccatatctttcatcagtaagccgtcatacagatcctccaccgttccattcagataaaaatcaattgcttcatctccgatcacatcacggtttctcatcagtcgtgcaatgatcggggaaatctgatatttctctgctattccattaaaatccgcctttttcattgcgacgaaccatttctccatccaaataccctccccgtctgtcagtatcatatttttttattataacaaaaatctgccgtatcgaaaatcatttttcattttcgatacagcagattctatttcgttactgtttccaggctgctatttatttcttagcgttttttgctctttttgttcttgaaagaagtcttctttccttttttcttcttggagctgtcgtctgcagatgtatctgctgcgttactctctgtggaagtagttccttctttcttgtctgctgcttttacagaaactgtctttgtgccggaagctgctctcgcagccttcgcttcctcaccaagtcttgtcttcatcacataccacagtgcacctgtgatacatacggatgtatatccaccgcagatgatacctaccatcagaggtgcagcgaattccttaatggagcttacaccaaggatatacagagcaacgaccatgacaaatgttgtaaagtttgtatagatcgttcttgtcagtgtctgagtaatacagcggtttacaagatctttcagatcttctgtacggctctttgttgccagcgcctcacggatacgatcaaagataacgatcgtaccgttgatagaatatccgacaatcgtcagcatacatgcaataaatgtatttccgacagatactcttgcgattacatagaatccaagaactacaagtacgtcatgcatcagtgcgataacagcacttgttgcgaaacgaatatctttgaaacggaaccagatgtaaagcagcatacagattgtagcaatgatcacagctataacagcatctcttctcatctcggaacttactgttgagctgatattctctgtagcgatatcagatgtctctaccccgtagttctcattcagataagaagcaagtgcttcacgtttctcaagatcaagtgtctgtgtcttgaagactacctgattgctgtcttttactgtctgaacctgaatattcttatctcctgtgatctcttccaggcttgggatcatctggctgtcgatctcttccagtgtatattctttatcaaatgttacatttgttgaagtaccacctacgaaatcaaggctgtaattcattgcgccgattcctcttgcatggttcacgcccatcatgaccggtccggccaggcaaaggatgatggaaacaatgaagaaaatctttttctttccaaggaagtcaaccggtttacgttctttcagatgtcttccgtatgctttctcattgcggatgcctgctccatagaatgcaaagataatcagtcttgtgatcacaagtgctgtaaacatggatacgacgataccaagtgcaagtgtctgggcgaatccctttacagtaccgcttccgcgaagccacagcacgccggctgcgatcagtgttgtgatatttccgtcaacgattgcggacattgccttctggaatcctgatttcagtgaagcgtgtacgctctttcctgctgtcagctcttctttcacacgggcgaagatgataacgttcgcatctaccgccataccgataccgaggatgatacctgcgatacccggaagtgtcagtgtaatgtcaaatgcattcagaaggatcaggatcaattctgtgtaaaggatcagtgcaaggctggatgcaagtcccggaaggaggtatacccagcacatgaatacacatacgattgccagaccgatgatacctgcgatcagacttcctttaagagcgtcctgtccaagctgtgctcctacaacttctgagctaagctcttcaagttccagattcagtccaccgatacggattgtagaagcgatgttatcagcctcttcataatccatgtttcctgaaatctgagcttttccattctcaatcactgcatttacgcttggcacgctgatcagagaaccatcatagtaaatagcgattgtgtcatggttattgttataagcttcttctgttgctgtcttgaacttctcagcaccctcatctgtcaactcaagatcaacaccatactttttatttcctgttgttgagtcgttgagcactccggctgaagctgtctttacctctgtacctgtcagtacgatggagtctgtatctttcagttcgtcgattgacttattcagtgtatatccggaagctgtcagggaatagttttcatttccctcactgtctttatgcttgataaagtacagtgaacccggctgtccaagctcttccaggatcttgtttgcgtcgctcacacccggaatctcgatactgatacggttgtctccaacctgataagcctgtgcctctgtgctgtactgctccacacgtttctgaagcttgtacacggtgtcatccatgtctgcctgagatggcttgtcaccttttacctgatatgtaatgctgactccgccttccaggtcaagaccgagattgatgttcttcgcagctcccattccctttaaatcaagtccaagcacacaggtcataccgaagagtgctgtaactgcgattacgagaatgaggctgagaatactcttacctttcttcatctctttctttcctttcttgactactgctctctaactttattgttcttcatccgccagggcagcctttatcatgatcgcacattccacacgttttctctccatctcacagctcacttcgtaagtatcatggatcgtattgtggaacttgtaagaattcgccatacagccaccactgcagtagaatctggcaaagcaggttctgcagctttccttggaatatacgctgcatccacggaattcttccgcaatctccggttttgtaattccctcatcgacatttcccatgaggaattcttcctgtcctacaaactgatgacatgggtagaaatctccccaaggtgtcactgccagatactctgtacctgaaccacagccggacagacgcttggacacgcacggtcctccttcaagatcgatcatgaagtggaagaaattgaatcctcttccgctcttctcacgctcgatcaggaattttgcgagtttatcatattcttcaaagatctgtggaagatcttctttctggattgcatatggttctgtgtcatcacctactacaggctcgattgacatctgcttgaatccaagatctgcgaaatgttctacatccttggaaaaatccaggttatttcttgtaaatgtacctctgatgtagtacttctcctgattacggctctctgccagcttctggaacttcggaacgatcagatcatagcttccttttccgttacggaacgggcgcatctggtcattcacttcttttcttccgtcaagactgatgacaacgttgtccatctctttgttcacgaactcctgaacttcatcgttcaaaagaactccgtttgttgtaagtgtgaaacggaaatgcttgtcatgaagtttttcctgctctcttccgtaagcaaccaggtctttgacaacctgccagttcatcagtggctcaccaccgaagaagtcaacctcaaggtttcttcttgttcctgaattcgcgatcaggaaatcaagtgctttcttaccaacctcgtaagacatcaaagctctgcggccgtgatattcgccctcttccgcaaagcagtacttacaggcaaggttacagtcatgtgcaatatgaagacataaagccttaacaactgtcttacgctgctttacaacgtcgataaagctctcataaatgtcttttgtaaacagacgtccctgttccgtcagttctgttactgcctctaaaatatccagcagatctttctcagaatatttctctccaagctcttttttcaatgcttctgctgtttccggagatttcaatgtctccactgtatgatcttcattcatgcgattaagcacttcgatgacatcatacgcttcctgatccacaacatgtacagctccgctgttcacgtcgaggacgatattatatccattgttctggtactgatgtatcacgtggatacctcgctttctatatgtatttgtaaatctatttgtaactgttcaaagcccggcattttcacaatgcagctctaagcagatacgtctaaaacatgcttaaggcagcgatttgcaccgctgcctcacctgtaatcctgttgctgtttttcgcataattgcaggcagtatcaccgctcaaagcaactttgcagcaacattatcttcactttcaggttttcttattttgcgttttcgcaagtctggtttcctactgtacaggatgtcttacatgcagactggcaagatgtctgacactctccgcatccaccttttttaactgtgttgttcagtgtctgtgtattcagtgttttaatgtgtttcatttttactcctcctaacttcgcacatattgctttcgctattatagcacacacagccaggtttttaaagtattttttcacacatctgtctggtttttcttcatgcgaccatcccaccaagcattccacctccggtacaaagtacaaatgtcagaaacaaatcgcctgtccctgacgaaacctcacggtacattccaaatgagatgagcagtaatagaacaaaataaaccacaccggttccaagcccccagaggaacttcttttggccttccagttttcccatcacaaaaccaccggaaaaagttcctattacataaatgagaataattcccagatttacattttcttcactcaatcctgctttataaaggagaagtgcaagaattaacagaaacattcctgtgaccagataggcgcaaagtaatgccttcactaaattttctgcgtatattatcccttttttcccatgattttctctcattttcttttcctttcgatgcatgtccggttttccactgatactattctatgcatcctcccggaaaaatatgacacttttaacttaactgcctcccaagcagatctgctgcgcctgccgcaaacttcttttccatttctccaaaatgctttttctcatttttctgcagaaagattactccacctgcaatatcaccttcactgagaatcacactgattatttcctcgctgtattcactcctgccttttgtaattgctacaaactcagcgtcactgctctttttcaacacggtctttctttcttgaaacacttctgccagctctgcactcaacaacatttcctgaagttctttcttcccgtttcctgctgccgcgatcacctgatccgtgtcagtaatacagactgtacaatcaagtgtcttcgaaagactatctgcataaatccctgccagtgttcctaattcaccgattggagaatatttctttaaaatgacctttccttctctgtctgtaaaaatttccagtggatcaccttctcggatccgcaatgtccttcttatttctttcggaattacgattcttccaagatcatctatcctccggactatccctgtggctttcatggcacatttccgttactgaaaacttataaaaagttataaacttccatgtttcattcctacttcaacgagtatgcttttgatgatataaatatctatctactcacaagttcttgtactctccataggcgtaaattccggactaacgtatccgtacatatttgcattaacgtttcagtgttagcttgcaaatcgttctccataagccttgagatttatagatgcctggaaatctctgtcaatcatattcccacattcacatctataaaccctgtcagataacttcaaatcttttttgatgtttccacagcagctgcaaagctttgatgatggataaaaccgatcagccacaataagctggatccctttatcattgcatttgtattcaagctgttgtctaaacctaaaaaatccttgttcctgtactgctttggataaatgtctatttttcatcattccgctgacattcagatcttcaatacaaataaatcttggctttcgatttacgatctcagatatggtctgattcaaatagtttttacggatgtttgttaatctgtgatttcgttttaataaaagtttttcctttttgattacattatttgttttacagtaactttcccctttcttatttttctcgtaagaacgagagatactacgctgtaatctacgtttctgtttttctagtttctttactttctgactcttattgatgttcttatacttaacggcatcagagcagacagctaagtctttaattcctaagtctatgccaactccatcatcgttaagtgtttccttgcagtcaggaaattctacacatacactgatccaccagttcaatccatcaaaggatattctcggattcatatatttaacatctgttggaatacgtccatgttctgcaagtcttacccaattctttttttgcttatttgctttcctgctggaagaaaaaccttcaagcttaacgtgggtattactgaattgtatcttaacgttgtcctgatagaacttcggcattgatctctttttggacttgaatcttgggaatttttgcaaacccttgaaaaagttcttatacgcagtacaggcatctttgattgcctgtttggttacattatttgaaatatttaataaccatgcgtattcatcagaatgtctaagctttgtaaattcttttctgagttctgaatctgaaatgaacttgccacccttttcgtagttttctttttccctggccaaagcccagttataagcaaatcttgaagctcctgcgtactgaaacatcttagttttctgtacgttgtttggtatcaacattacttttatggctcttaccatctgtttcctcctgtatcaattcccggataagtttcttagctttattcgctcgttttccttgtaatttgcaactgaatactgtgattatttgaaccagatcttcaacaagttcctgctgttcagatttttcagtattatcaataatctcaatctcacaattataaagtgaagcgatatattctatcaactcaaaaccaaagctcaatagcctgtctttatataaaacaacaaccttttcaacctgattttgagagattcgtctgatcaattcctgaagcccttttttcttataatcaatcccagaaccgatatcacttattatctcaaacggctgcccttttgctagaagatatgtcttgacattatcaatctgtcgttccaaatcatctttttgtttacggctggaaacgcgacaatatccaattgtaatgcgatttttaggctttacatttattacttggttgagttgctcatcggaataatatctatagccacttactgtagtatgatgcggatgaagttttccattggcatcccaatttcgtaacgtctgagcagatacgcctataatttttgaaaattcatgtatagaataatatttactcaaagtatcaactcctttcaataatattctactctaatatcttataaagctcaacaccggcttatatgactttataatttatatttaactgttaacaacctccataatcaatttttgattagtatgtggtaaaatataggaaattatgttctttttgtgataaaatgatgtaagtgcgggaatgcatagcaatggagaaatccggttacatcagtgagtggcaaaatttacttttgacactcacatcataaaatacttaatactgattatgaaacaaggagattttaaatgaaaattgtatttttagatgtcaaaacaattggagaggatattgatctttctgcatatgatgaactcggtgaagttgtaaagtacagcttttcttcacctgaagaagtcccggcgcgtgtcacagatgccgatgtgatcatattaaataaagttccggttaatgagcagactattggaactgcaaagaatctgaagctggtctgtgtcacagccacaggcacgaacaacctggataaggaatatcttgattcaaaaggaattgcctggagaaatgttgccggctactctacagagactgtcgcacaacacacatttgcaatgcttctctttctattagaaaagctgcgctattatgatgattatgtgaaagaagagcgctatgtaaatgatgtctctttcactcattttgcagaacatttcacagaaatccatggaaaaacctgggggatcatcggtcttggggcaatcggcagacgtgttgctgagattgcacgtgcatttggagcgaaagtcatttactactccgcctccggtgctccggtgcaggaaggttatgaacaggttgactttgagacattgcttacgcaatctgatattatttccgtccacgctccactcaacgagcatacagaaggactgatcaacagcaaagcgtttgaaaaaatgaaatcttcctgtatttttctgaatctcggaagaggaccaatcgtcgatgagcaggcattatataatgcactggtcagaaatcagattgccgcagcaggattagatgtcctttgtgaggaaccaatgtccgcagataatccattgctcaagatcaaagacagtaaacgcctgctgatcacaccacacattgcctgggcgagcgtggaagcgagaactcatctgatggaaattatccatggacaagtcaaggacttttttgcttaagattaatattttgtttatccctacaatttttctgcaatttgcaatcaatatttttctgtaaagtttaaagaaaataattgtaaactccaggtaaagtgttttataatagccatgtacgtaattttttgcaagacgtaacatgtcaacttaataacttaagaaaaaggaaaaaagaaaatgggaattacaatggttttgtccttgctcagcggagttgccctcttcctgtacggaatggcactcatgggagacagtcttaagaaggttgccggtaacaaactggaacttatcttatacaagctcacaaactccccaatcaaaggattgctgctgggtacagtcgtaacagcgatcattcagtcgtcatcagctacaactgttatggtcgtaggattcgtaaactccggtatgatgaaagttgctcaggcaatcggaatcattatgggtgccaacattggaacaagtatcacaggctggattttatgtctttcttacattgatggctccagtggcattgcgcagcttctgtccaccgcaacaatctctgcgatcgttgcgatcatcggtatcatcttccgtacattcgtaaagaagaaaccttattccgatatcggtgacattatgcttggttttgcgatcctgatgttcggaatgcagacaatgagtggtgcagtttcacctctgaaagagaacccacattttgtcagccttctgacaatgtttaagaatccatttatgggtatccttgttggtatcgcatttactgcagtgcttcagagtgcatctgcttctgtcggtatccttcaggcattatcaatcacaggctctattacatttgctgccgcactgcctattacaatgggtatcggtgtcggagctgcctgtcctgtactgctttcttctatcggtacgaacaagaacggaaagcgtacagcacttatttacctgctgaatgacttattcggaatgatcttttggtctatcgtattttactcagtaaatgctgctgtccactttacatttatggacatggtcatgagtcctgtcaacattgctttattgaactcggtattccgtatcgctacgatcctgattcttgccccatttatcagcaagattgagaagcttgtcttcttcctgatcaaggatacagacgaggacaacgaagagcaggctgattttgatctgcttgaggaacgttttctggattacccgccgttggcgatcagtcagagtcagatggctgttaacggtatggcgaagaatgcccgcaagaatctcatgcgcgctttcgaacttctgacagactttagcgacagcaagttcaataagatccaggaaaaggaaaacatgatcgacaagtacgaggataaacttggtacttatctgatgcagttaagtatgcatgatatgacacctgagcaggcgaaacagacctccaagttccttcatacgatcagtgacttcgagcgacttggtgaccacgcagtcaacatttccagagttgcccaggaacttcatgaaaagtcccgcaccttctctgaatctgctacttatgagctgaatgtgcttgagaatgcattggttgagattgttgatcttacagtaaattcttttgtagatgaagatcttgagactgctgcaaaggttgaacctctgcgcgaactgattggtattctctgtaatgatctgaaacttcgccacattaagagacttagaaatggtcagtgtaatctgaataccggatttgcttttaacgacctgcttacaaactacgagcgtatcgcagcgcactgttctaacgttgctgtagcgattctcgagcttgattcttctaactttgatattcatgaatatacaaagagtgtccgcaagctgaaggatgaaacttatcttacagcctttgaggaatatgaaaagaaatatgatatcaacggatatcagccggaagctgaagcagataagaaattctctgcaaaagcgaaggatagcgagaaggataaggacaacgagaaatcttccggaaagaagaaagacaaagacaagaaaaaagataaaaagaaataaattcctttctattttatacaaaaaaggaatagctcacaaagagctgttccttttttgtatatattatccttacgtgcaataccgaaatgtcttatccgtaagaattcttgcaaagatcaaccctaacggaagagctgcaacgatcagtattgccgccgcaaaccaggaagctgatgtagaaagattcattgttcccagattataaaatccacggtacagatacaatcccggaaccatgattacaatcgacggaaccgtgacagagattctcggatatccgacccgatttttaatcatagttgctaggagtccggctgttaatgctccgacaaatgctgctgccgccggaggcaatgccgtcagatcaaccagttccaatcgcaatgtattggcaatagcaccgattcctgccgccactgccgcaaggcgtgtaggactgttgaacataatcgagaatccaaacacaccacaaaagcttgcaagtaaccggaaaataatccattcttcctgcgtcagatcaagtttcaggaaatccacaggttgtaaatttaagactagtgccatgatccatgcagacattgtagctaccaaaacaataatcagtgcatacatgagtcgttccatgccagaacgcatgtccaattttgcaaggtcaattccacttgtgataaaagggaaacctggaataataaatagcattgcacaaatatatcccgcctcatgctggattggaatcgcccacaaaatctcagctgctttcaagagtcccgcataaaccagacaggctgccgaaacagatgaggctatacacaaaaataatgtgaaatgatgtttactcaatttgcacctgataaaatttccaatccctgcaccgacaaatgcacagaacatttcaatcaatccaccgccaagcagaaatgtaaatccaccgcatgccaatgctgctgccattcccaatgcaattggagaatatagtccgtgaatctcttcaatctgatccagcagcttatgcagttgttcaccagacatatcctgtccgccctgttcgaactcacggataaagtgttccagtctgtttaacttagatgtattcacgcctgtattcgtcagacacaaagactgcgtgaatccatcatcaccatcaaaacaggtatactcaatcgacatcagaccaatatccgctgtacacgttatccccatctcttctgctagtgcgttcatagaacttctcactctccaagctccggttccacaggagagaagcataatccccactcttccgacaattgatgctttctccgtcaaacttgcttgtgttaccggtatttcttctccacctttatctgtgtattcatgccagagaatatccatatgattttttcttattttctgtgtctgcatctcattcacttcctctttattccaggtcaaggctttccgctccggcctttttcatcatcttctctctgcatgaaagaacaatcccatcaatctcatccagatgatgaagcattcgtttctcaaatccatgaattggaagtaaaactcctatctcgtcaaatcctttctgacgcttctcaccggtatcctgcccataataaacttccactctcggagcctgtttctgaatcttctggaaagtatcccagacaactgcataggcctgtgcttctgtcagtccaagctttctggtatccggtaatgcatataacgccatcacgccacgcttcttgttctcttttttctcctgaatctgcatgccctctgtataggaacgaactatgtcatatccgtcagcaagatacagttttgatctcggtgcacattgatgttgcctgtacgtctcatggaacttttcatattcacgagctgttacttcccttttcttactctccagaagctttccctctacatcagtcaggagaaccggattctctcctgattttccatgaaatttctttggaatcagatatgcgtcccgaagcagatcaaacatacttcctccgcacaattcaagtagcaacgcgctgacatctccatttttatacgcctggagcaagacctctgcaaaatgtctgtcaccatcgtcatttatttcctgataattctccaaatgctcataaaatacttcatttagccgatcacaggcctcttgtgactcaagaaccttagatataactccttctacagcttcttcacgtggtaatactgtctgcatactcacacttcctttgttatttcttgtttttcgcctgttaaaacagaacaaaatcctacttattaatatagaaagcgccggttctaaagtcaaaccggcgcatactgttttattcacatatctgatatatattttctacataggaatagattgaatccatgatatcttcttaaacaataccttatttcagaactaacatttttttgaacatctccgccgcgatacttggcggaaatgtgtgattctcaaccagacagatttctctttccggaatattttccttcaacagaatctgacagacttttccttcctcgatcactggtcttacgaacagctccggaaggaatccaatgcccagtccattcataataagcggcaacacctgatcgatcgtctcaacttccgtatccggagatagaaccagatcattctccaggaaaaatttggaatagaactcataggttgtgcttccctgcccaagagaaatcaacggattctcaattaagtctttcagccttattggtttttctttcccctgaaaagaatgatctcccactgcaatttccttaaaagacattaaagaagtacttttcaacggcttctttgcctgaagcggcgtagtcacaactgcaaagtccgccagtccgttcttgacggactcaactgcctccggcgtggaatgattcagaagtctcagccgaacacccggatattgcttatgaaagcgccccagtataggaagaagtaaaagatgaagtgcaatctcactcgcactgatcgtgatacttccgctctccatgcttcgctccattgcaagctccgcttcagccgcatgaagatgctgatatgcaacagaaacatgctgatacagcttctctccttccgctgtaagcgtaactcctcgattagatctgacaaacaatttacacccaagctgattctccagattattcataaaatgagtaatattcggctggttgctcatcaatactttcgccgctttagaaaagctcttatacattgctacataataaaaaatccggtaataatcataagtaatttccataagtcccccctaaactgacactaatctgttactctccacctgcagaggtgggagtcaaaccacatctgataaatcatataagaaatgtatatctgtcataacaaatatgtatttttatttctttgttatttattatatactgaatgacgaaaaaatcaaacacattcatttacgaggggcgatatcatgatcaagcaaaatattaaatttctcacaaccggacaatttctcactttttcacacacttgtaaaaatctttcttcggatgtgcgcatccaggatcttgagaaccacaatcgcgtagatatcaacggaaaagatctttctgagcttgccacgatccagcttggtcttccgtttctcctcgttattcatggagaagatgaaaaaatggccagaagaatgttgaagaagtattgtgcataaaaattgagttgccgtttacactctgtataagcagcaactcaactcttattactctccccagacttcttctgcaatttctttcacaagctttaactttgcccattgttcctcttctgtcagtttgtttccgatttcacaggaagcgaacccacactgtggactgagataaagtctgtctaatgggatatattttgcagcttcatgaattctcttgatcacaacttctttctcctcaagctgaggtatcttcgttgtaattaaccctaataccacttttttatccggagatacctttgcaagcggagcgaatccaccggatcttgcatcatcatattcaaggaataatgcatccacattttcttttgcaaagacataatctgctacagaatcatatggtccgcttgtaaaaaatgttgaatgataatttcctctgcagatgtgggaagtgattaccatatcctccggttttccttccagtgcaaggttattcacttcaagaagctcttttttcacatcttcaatatccgttccaagaagtttgtatctctgctttgccgcatctccgacaattgctccccaggtacagtcgtcaagctgaagatttctgcatcctgcttcatagaactgacggatcacttcctgataagctgttccaatgtcgtggatcagttctttgtttgtctcataatattttctcgtatttttatagttgaccggaataatcatctgctggaacatctgcgccggcgccggaattgtatattttgcaactgtgttctcatcctcaaactgtttcaggaatttgaaatgttctacaaacggatgcgcctttgcctttatctttcctgtcagataagtatcttccagtgatgccagctctccatcaaactgtaccccgctgccggtctgttcatgaccgacaccttcaaatccccacataaaatccagatgccagtaagttcttctgaactctccgtctgtgatcacatgaaatccaagctctttctgctttgctacaatttctgtaaccgctttatcaatgatctgattcttttctgcttcgctgatctttccttcctgataatctgcattcgctttcttaacctcttccggtctcaaaaaacttcccacaaaatcgtatctgcatggtgtctgatatttgctcataaattaattctccttttatttttgtaagtgatgttttatctgcaatcatcttatcattccatgcttattttgaaaaatatataaatttatgcatttgtcatagtttgaagctatggtgagtaaccctctattatatttatgggctatcactccacccagaaaacataatcatcttttctgggtttcgcctcttctatttcttcatccggatatccaagtatacagtgtccgataccttcatactctcctgtcactccaagatcagacaaaatctgttttccttcttcactttcaaactcttcctttgcacgatgaatccaacaacttccaattccttctgtatgtgctgccagcatcagattacccattacaagacttccatcatacacatgtgttggccagtctttctctgccagtacaaccaataccacaggtgctccataaaacggatcaaatccttcatcccatccaccaatcttacgattcatctctgaaagtctgtctcgtaattctttatttgtcactgccagaataatagatgcctggtgtcctcttccatttgctgcataagtccccgcctctacaattcgctcgattatgtctcttggaatcatatcagttttatacttgcgaacacttcgtctgttgattattgcttctcttgttgtctctacttgtttcattttgaataacctcctgtttatttcttttactgatgtattatttctaataagaatactacacctattatacattatcaagaattgtatttaacaaaaagggcgaagcttacaccttactggtacaaatcttcgccatttctttcactttttcaactatatttctttcacccttgatcaaatcacaagaatctcatcctgcaccggtccatacactttcgtttctccctccgaagtaatatgcacatcatattccagtctcacaccatacttatctgtatacagtcccggttctatggaaaacatcgtaccagggagcagacagcggtcatcatgtgtttcataatcatccagattggcaccaattccatgacatctgtgaccgatattatgtcctgtccggtgcatcagatactgtgcacatccaagctgttcgaatctttctttcagccttcgatccacttcatatcctctgactttttctcctgcatctaatctcgcctgaataaactgtcttgcatcttcccgcgcatcatatacgatctgaaaccatttctcatactccggatcaatcttttctccgacattcatgcaccaggatacatcataatataccgcatcctcttccggaagacgtccggcaatatctatgatcaatctgctgccttcacgaatctgcctcgaaccattttctttcggttcatatcccggatcacaggcatgctcatcaactccgaaaaacggcggagaatccatatagatattctcctgccctatcagttcctgcatctgctgaagcatcgcatactcatcaatataattacctgcatctatattctctctgatccaagaaaatgtatcagtaagaatcttatgtatgataactccagcctgtcggtgtgtctcgatctgatgttccgttagtaccgcaccgaaatgctgcatcatatctgcacttgtaaccggttcgattccgtaagttctaagatactcgatcaggccagcatccatagagctgatcgtcgggacatttccgcccggagagtactggcaggcaatcttcatgcccggcttcaataactctgacaacactttcttctgtccctcaatcccttgatataatattttctttcccggtagatgttcgagaagaagtggttcaatcgctgagagcaccttcaccggttcgccctgcgccggaatcaaatagaacagccttcttgtgcagaaacgatttccaagctcaagaaactcttttgtgataaaatcatgtccctgaaaatctgtaaataaccatctgtcaagttttgcttcctgcaataacttctgtatctttgcaatatccaacttaataattctcctttttgattatcaggcatacgtactatggcattgacttcctatgctcattgattccttatgctccaagaattctcttgtaagccttcttcaccggcacatacagaatcgcaattcctactactgtaaatcctgcattgatgatcgtagccgggatagatgtgatctctgccgccaacgctgcgctccaggaactgccgagaacaaccagttcaactgttgaccagataaagtctacgataatgttcgtaacgccgtagatagccgcacagaggactgcataaccatattccttcttcgcatctccctgagcttttttcttcagagactgaaagatcatgcccacaagcagacatttgataattgtgctgacgaatacattcgggattgcctgaatataaccgttcaatacatcaaagacgagaagtccgagaactcctgccacagttgaaagcttaggtccaagcattaatactgcaagcattacgaaaatgtgtccgaaatgcagaaatggtgttccgacagccgccggaagcggaatacggaaagactggattcccagataaataatagctgcaaaaaatgcagtcattacgattttctttgtgctgatactttcgtttttcatattttgtaaatctcctgtttgttatctcttatgttgagtaataatctgacagctaatgtcagacttgtaagtgaattttcccaacataccgccttattatatcagcgccctggtctgttagatatatccagttttaaaatatttatacaagccagttttatagttatataacaaaacaagtaaaagcaacacagaaaaaaacgtccccggggaaatcccccgagaacgttttctttcaacttatattcttaatgtcatccatatatggattacaaaagtattacagaagtcctccgatagaaaggaacagtggagcgaatacaagtgatacaactgtcataagtttgatcaggatgttgatagacggacctgatgtatccttgaacggatctcctacagtatctccaacaacggctgccttatgagcctcactaccttttccgccgtggtttccttcttcgatatacttcttagcgttatcccatgcaccacctgcatttgacatgaagatagccataagaactcctgttacaagggatcctgaaagaagtccgccaagagcgtcaactccaagaagaacacctactactacaggaacgataactgccatcagacctggaagaagcatctcgtgaagtgctgctgttgtagaaatagcaacgcatgacttgtagtcaggtttctcttcacctttcatgatgcctggtttctcacggaactgacgtctaacttcctcgatcattgagtatgcagccttagatacagactccatagtaaatgctgagaagaggaatgtaagcataccaccgataaagataccgatgattactttgtagtcaagaaggttgatggatttcagacctactgtctctgcataagatacgaacagcgcaagagctgtaagtgccgcagaaccgatagcaaatcctttacccatagctgctgttgtattacctacagagtcaagcttgtctgtaatgtcacgaacggactcatcaagaccggacatctctgcgataccaccagcgttgtctgcgatcggaccatatgcatcaactgcaacagtgattcctgttgtagaaagcataccaactgccgcaagagcaattccatacagaccaaatacattataagaaacaaaaatacctacacagatcagaagcagcgggatagctgttgatttcataccaactgcaagaccactgatgattgttgtagctgcacctgtctcagactgctctccgattcctttaaccggtttgtaatctgctgatgtgtagtactctgtgatgttaccaatgataacaccaacaatcagaccagcgataactgcgattgctgcgttcatgtttccgaaaagcacccagctaagtgctaaagaagcaatgattacgattgctgaagaagcatagcttccttttgtaagagctttctgaggatttgtgttctctccgcctcttacgaagaatgttccaaggatagaagcgatcagaccacatcctgcgattgcaagtgggaataatactcctgaaacttcgcttactgcaacaccaagtgtcagtgctgagatcagagatccacagtaagactcgaaaaggtcagctcccatacctgctacgtcacctacgttatctccaacgttgtcagcaataacagccgggttacgcggatcatcttctgggatacctgcttctactttacctacaaggtcagctccaacgtctgctgcctttgtatagataccaccaccaacacgtgcaaacaatgcgatggaagaagcaccaaggctgaatccgaataatacatctacattcttagttacgatgtacacaaggctgacaccaagtgcaccaagtccagcaacacacatacccataacggcaccacctgaaaatgcgatggaaagagctttgttcattccgctctctttagctgcgttagctgttctgacatttgccttagtagcaactgtcattccgcagtaacctgcgattgttgagaacagagcacctactacgaagcaaactgctgttacccagttacctactcctaatccgatcagtacaaaaagtactactacgaatacaataaggatcttgtactctgctgtcaggaaagcacgtgcaccatctgcgattgcaccggcaatttccttcattctttctgttccggcatcctgtctgctaacctttgctgcaagatatgctgcaaaaagaagagcaatgacagctgcaactggaaccagatacatataattgttcattcttaattttccctcctgaatttcaatatcatatgtttgtattacactatatcacatttttttaggtttttaaagaaaaattttatgtttatttaactctctttacataaaatagtatttttttcacatttttcttttcaaattatatgataatctaaaaaatttttaggtaatttttaccatcctgtgttgttttttacgctgttacttcttattaaatatagtagtatataagatttcaatcttatttataaaaaaaaattattcaaaaaatcgttcaataatcataaaaaataatctccggaaaaacagtctttactgcttttgggagattattttttttatcaagtattattctacatctttcaatgcttcgagatcttcttctcctgtacgtacttttactactttctgcacgttgtatacaaagatcttaccatcaccgacatgtcctgtatacagtgtcttggatgctgtttcgatgactttctcaaccggaatatttcctacgataacttctacttttacctttggcagaacagtaacgtccatctcaactccacggtatttctcgccggcacctttctggataccgcatcccataacctgggtaactgtcattcctgtaacaccaagattgttcaatgctgctttcaggcgctcgtacttggaaagctttgcgataataactactttatgcattcctgtatctgcatctaccggtcctgctaccggtacagatgctgctctctggattggagatgctgcgtcataatctgctacaccaagatctgtgttttcattttcattcattgcaccttccgtaatatccatgatgctgaatcctgcatatgctgatgcaagaccatgctccttggaatccagaccaacaatctcttcttcctctgaaacacgaagtccaattgtcatatcgattactttgaagataattgtcattgttacaactgtccaagcaagaactgttactataccaagaagctgtgttccgagaagtccgaatccgccgccgtagaacagacctttcagtgtactttccggcgcatttgttgttgcaaaaagaccaactgcgattgttccccagataccatttaagcaatgaactgctacggcaccaaccgggtcatctacatgcactacattatcacagaaccaaacgccaaatactacgagaactcctgcaactgctccaatgatcagtgctcctaatccatctgtcacatcacaaggtgctgtgattgctaccagacctgcgagggatgcattcagacacatagacacatctggttttccataacgaagccatgtgaagatcatacatacaacggttgctgttgccggtgcgattgttgttgtcataaaaatagatgcaagctgtgggcctgttgttgctgccgcaccgttgaatccataccatccaaaccagaggatgaaacatccaagagcacctattacgaggttatgtcctggaaatgcgtggacttttgttacttttccattcttatctcttgagaatttaccaattctggctccttccattgcagctccgataaatgctgttactccacctaccatgtggattgcacaagatcctgcaaaatcatggaagccaagctgtgaaagccatccgcctccccagatccagtgtgcttcgatcggatacacaactgcggagatcattgcggaataaatacaataggaaagaaactttgttctttctgccatagctcctgatacgattgttgctgctgtcgcacagaaaaccaggttgaatacaaaattagaccagtcaaagtttgcataatctgtaaagattccaagtgttggaactcctaccagtccgccaagtgcatcttccccgagtaacaatccaaatccaaggaaaataaacacgattgttccaatacaaaaatccatcagattcttcatgataatgttaccggcattctttgctctggtgaatcctgtctctaccatagcgaatcctgcctgcataaagaatacaaatgcagctccgatcaggaaccagatgccgaacacttctgttccgactgtgtctgtaatctgagtaataatttcttgtgtcatactacttcatcctcatacctagaaactaaaaagacatatctcacagcttcgttgaaccatccccctgaatcggttcttgctgtaagacacgcctttgtgtcattgagacttgctgctgttcgcggcaaatctataggtaccatattttattaaaagaaaaaggcactctgagatctgtttctcaaagcgcctttgcttttatgtcacgtagtttactcctcgagcccaatattgtcaacctatatttttacttttcgtaaattttctgattttttatgcttttcatgcatttctttcatatatttccacaaaacagagtgcactcttgcaatataaaccaccatctgctaaaatttatcttatgaatcaagagcaatccgctcttttcaataattgtaactatttcaagcatattaaattataaggaggactctaaaatgagcaaaattgatgaaatcagaagcgctatggtcgctgcaatgaaggcaggagacaaagaacgaaaagccgcactttcctttctgctctcctctctgaagaataaagctatcgacaaacgtgccgacctgacagaagaggaagaaggacaggtaatcttaaaagaaatcaaacagttaaaagaaacaattgatatgacacctgaagatcgtacagatctgattgaagaggctcagaagcgtcttgctgttcttgaagaatatgcaccaaagatgatgagcgaagatgagatcaaagcagtgatcacatccgttcttgcagatcttggtatcgatgctcctacagcaaaggataaaggtaagatcatgaaagaactcatgccaaaggtaaaaggcaaagctgatggtaaagaagtcaatcagattcttgccggcatgatgaaataaatacagattccagaataaagacgtaacaaagagggtgtcgcactaaacgacaccctcttactttttgttaattatttcattttttctgcttattttgttatctgttttcccacttatgataaatcgcctcaagtgcatctaccgcaccatcgattccaagaagacttgaattcagcagaattgcattcgcttcaatactgccccacttacggtctgttctaccttcataatacaggcgtctctctctgtcaatcttcttaatcttatctacagcctctttctcggaaagcttatagatatccatgattcgattgattctatcatccttataagcatagataaatgtattcacaacatttgaataatccccaagaacataatctgcgcagcgtcccacgaagattccaggtccacgttctgccagcttgcggatgattgctgactgcgtctcaaaaactttgtcactcaatggcttctcggcctcaggactaagcataaatgttgtgtaatcgcccattccaatataatagcttgataacacatttcccagtctcatctcatctactcttccggcttcttcgttcgaaattccaagatctcttgctgccattcgaatcagattgtgatcgtaaagaggaatgttcagtctctctgccagtctgtttcctacttcatgaccgccacttccgaactgtcttccaattgtaataattgtgtgatccatcataagcaagtcctcctttttctgataattctattctatcactctttgaattaagaaaaaagactttcttcctgttttccgctaacaattttgtaatactgtttcgaagtcaccagatacacaatgatataaaataatgcaaataccagataggagcacatggtcaccagaatcaggaattttctgtcagaaaaagcaagcagatgcaccattttttctatcattggaaatgcaaatgccgtatgaattccggcagccacaagaggcaggaagaatactgtcattacctgagaattgatcgtctgacgcacttctttctgtgtcatccccactttcatcagaatctggaatctgtcctgatcctcatagccttctgtaatctgtttataataaatgatcagcaccattccaagaatgaatacgactccaagaaggattccaaggaagaacagaccgccgtacaaagcctggtaatcagctcttgatgcggctctgctgtctgtagaagctccaaaaaatagggtatctgattcctctgattcctgttcagccaatgcattgattttcttgtcaatctcgttttgaatctggatctgctcttcatctccacaggacagatcaaaattgtagtaccatttctcataagaaccattgacaccgtaaacggaaacatttccttcttccaaagcttttatatcttccagtccggaaaccaccagatagaagctgctgttcatatttgccatattatttccatttgaaatcattttatccaaatgtcctttaatcctccatgtcccggaattctccaccgtgatctgatcataggggaaatcggaatctttcgcatacagatacgcttccccgggagcaagctccagattcgtccccatgatccgattatatgcttccaacggcagagcatagaacatttttaaatgatcaaatgtattcacttcattgactcccggagcattctccggattaaaatagatttcattttttgaaacaattccactgactgtaagcatccggtaattctccggattctccgcggtctggttatgttctttcaaaaccttctgtacaagctctataatctgtccattctgattctctttcatttcttccgtctgctccggtttcgtgtacatctcaatctggacagatttcggatatcgaagattcaagccatgttccatactcagatacaggctggttgtagaagataccataaccagaaccattgtagacagaatacaaatagacgctaatcctgccccatttcgtttcatacggtaaatcatggatgaaagtgaaacaaaatgatttgttttataataatatcctttctttttctgcattattttacaaaatgtgaccgagccggcaataaataacagatacgttgcaaggattaccagcacgacggcaaccataaaccagatcatcgctacaagcggatctttgattgtcagagataaataataagccacaccaagcagaagcaacccgagtactgcaaagatccagtttgccttcgggggtttctctcctgtcttttcactttttaaaagttctacaggttttaatcgatagacagacacgatcatccgaagcatgatcaatgcaaaaatggccaggaataacaggaccgtagctacgagtgcctgaacactgatcttcatagaaagtccggcattacttacaagtatcttcgctgccagaagttcccccaatttagaaaacaggattcctcccacgatccctcctgcaatcgtcagaacactgatgagcagattctcaagaaccatgatttttacaaggtcaatttttcccattccaaggatgtgatacaacccaaactctctctgtcgtctgcggatcagaaatgaatttgtgtaatacagaaggatcagagaaaagattgcgatcacaccggagccaaatccaaggatcatctgcatagtatccccacctttgatctgggcaaactgtgggctcactgcaagataatcgatcagatagaacatcataaccatacagatacatgtgatcagataaggaagatacagcttcttatttttcttaattccattaacggaaagtttcatataaagtccacttttcattgtctctcaccacctgtcgcaagcattgtaagtgtcgctgagatattctgatagaactgttcatctgtctgttcgcctttatatacctggtggaaaacttctccgtctttaataaataacactctcccggccttgctcgctgctttgacagaatgtgttaccataaggatcgtctgtcccgactgattgatccgctcaaataccccgagcaattcatccgttgatttcgaatcgagtgccccggtcggctcatccgccaggatcagtctcggatctgtgatcagtgctctcgccactgctgcacgctgcttctgtcctcctgatacttcatatggatacttctccagaagtcctgcaattccaagttctttcacgattggcatcatcctgacattcattttcctgtaatcaactccctgcagtaccaatggcagtaagatattgtcctttagattaaatgtatccaaaagattgaaatcctgaaatacaaacccaagatgatctctcctgaacttggacagatccttctcacggattgctgataacggttttccatccagataaacttccccttcagttggtttatccaatgctgccagcatgttcagtaatgtcgtcttccccgagccactctctcccatgattgctacatattcgccctcttctactgagaatgttaccttagagagtgcctgtacctgattaccgccaaaacgcggacggtatatttttttcaaattttctacttccaaaactgtcatttcttacgacctcctcttctttctttcaacatcctcagtatagcaatacagccagaatgccaacattgatttctgtgacattccagctgtctgatgtgacaattttgtcacttgcttctctctgataatttagtgatttactctgctctcaacggatactctgccagatctattgtaaaactgctgccttcccccagcttcgacacaaccgtgatctgatgccccagtttctttgccgccatctgactcaggtacagaccgattcccgttgatttccgttccattcttccattatatcccgtatatcctttttcaaagattctcggcagatcctccggtgcaatccccattccggtatctgtaactgtcaatttcttttcttcactgacaataatcgtcacagttcctttcagtgtatatttcaccgcattggataacaactgttcaataataaacgaaagccatttctcatccgtcaaaacgatctgatctgtcccttcatagatcagacggattctccttcgaataaactgtcctgcatatttacggatcgattttcttataatttcatccaaaggataccgtgcgatcaccagatccttcgtgccactgtcaagacgcacatacccaagtaccatctccacatactgctccacccggaacagttcggctttcagattctgattcgtctcggtatcttcctgctggagcagcacattcatcacagcgatcggtgccttgatctgatgcacccaggttgcataatagtcctccatgtcctgaccggacttctcccatctggcatgttcttttctttgctgttgttcttcttttctgattagctcctgatatcctgactcaatcccatcttgtgcgattggaagcgaatcctcataaggtccttctccttgcagcaaatgttccagcttctgcccggttttcttataccgcaaatatccacagagaagaaaaagtaatccaaatgccagacacaacactgtcggataaaccgctgccttcagattaatctcttccaacacaaaaatcagaaaaaggattcccgcacacagcaaactccacagaagcacaaatcggattcttttcaaatattgtaaaaacatttttactccttctcgatgatatatccaccgccgactttcgtcttgataaagccttccattcccgctttttccagctttttccgaagtcttccgacattgactgtcaatgtattctcttcgatataattgtctgtctcccacagctttgtcatcagcgtgtctctgctgaccacgcgtcctttattctccatcaatgtctgtaagatacgaaattcattctttgtcaactcaattttttctccattataagtcattgttgtatcatagaggttcaggattgctcctctatgttccagcatcggtacttttcctgatagatcatatgttctcctcagcagagcctgaatcttcgctgtcagtacacttaagtcaaacggttttgccacaaagtcatctccgcccatattcatcgccatgataatattcatattatccgctgctgaagagataaagatcaccggaacgctcgatatcttacggatctcgctgcaccagtggtatccattataaaaaggaagcgtgatatccaaaagcaccagatgtggaccgtactctgcaaatgtctcaagaacctttgcaaaatcttccacataacgtgcttcatttccccacgcttccatctcttttttaattgcccctgccatcacaaggtcatcttctatgattagaatcttatacattctgcggattcccctttcgctcttatccactactatatatcatagtatacagtatttcaagagcacacggtcataccgtatccggcgagataacccgctggatatggattgcaagaaatccgatttcttcttttgcgaccggttgtttcagctgtctggacatatagtcacacactctcttcgccgcctctccggtccttgggtaattctgaaaaatgaaatcattaaagtctgcattcgtcccttcacccttacgggttctcagaatcatataatacatatgactcatcagacgtgtacatccaagtgagccgctctccagcttctgatcgaattcctgttcaatcatggcaatcccttcatttacaatcctggtcgcatccagagtctgggatactgcctcatcagaaaggcctgcatggatatgtagcgtaatgaatccgacttcatcctctgagatttcatatcctgtcagctgctgtataatttcccgccctttcagggccacttgatactcctctccaaacaacacacggatatccggtgtaaatggattcggaagctggcggttctccttcgctctcttcgctgcaagcgcaatatgatctgccaacggaagcaacatctcatgattgatcttctgaaacacgttctctgcttcttcaatgatctttcctgttgcctcaataaactccgggcggattccattgaccgttttcagaacagactcctgcttccttcttgtgataagagaatatactttggctccgggaagtttctcgatctgttctgtaggtttctttccaaatcccacaccgtttccgagaaggatcatctccttccctgtctcaacatgatatacaagaatcccattattattcagaactttaatgactcgatacatccccccggagcctctctttctttctcttaattcaagcttacgatttctgctgtcttctcaagcttctctacttttccgctcttagacattctgatctcttcaccttcctgaagacttgtaaatacaaccatacattcatcggattttgcatgctcttggatatattttatatcaaaacctatcagtttgtcacccttttttactcgatctccgtcatttacaaaagtttcgaatccttttccatccagatttacagtatccacgccaatgtgaagcagatattcggttccgtcatcactagtcagaccaactgcatgttttgatgggaagataaaagatacagttgcatcttccggcgcataagccattccctcttccgggcgaaccagataaccgtctcccatcattttccctgcaaatgcttcgtcacacgcttcttcgatcggtgctgccactcctgtgaatggagagcaaagctctttctttacagttccggctgcaacagttttgttctcatctttcttcgcttcatcttttgtttctgcacatttattcgtttcttctgcgctgttttcgttttcttccggaagatattccacatccggagctttctccagataatcttccagattggatttaatcacagaaacagccggtccgtagattacctggattccctgtccttttcttacgattccggatggggatgtcattcttaagacatcttcatttaccagttccggctttactaccgtacaacgaagtcttgtcgcacagcagtctacatcagaaatgtttttctttccaccaagtcctcttgtgatcagtgcgctcttctgatcttccggtgtcatttcattttcagaatctgcatcatttccatctacttttgctttataatcagcttttgtatacagcttcgtttccgcatcatcatcttctcttcccggtgtcttcagattcagcttcagaatcaaagtacggaagatgatataatataagaagaaataaataattccaaccgggatgattctgatccagcttgtcttagcatttccctgaaggataccgaaaaggaacagatcaataaatccaccggaaaatgtaagtcctactgcaatatttaacatatgcgcgatcatataagcagatccggcaaggatcacctgtaccgcaaaaaggatcggtgctacaaacaggaatgagaattccagtggctctgtgattccggtcatcatacatgcaagtgctgcagaaagcagaagtccgcctgcctgtttcttcttctccggttttgcacactgatacattgcaagtgccgcacccggaagaccaaagatcatgaaaataaattcaccggaaaaatatcttgtcgcatccgcactgaaatgtactgtggatggatctgcaagctgcgcaaagaagatgttctgaccgccctgtaccagctgtcccgcaacttccattgttcctccaaccgctgtctgccagaatggaagatagaatacatggtgaagtccaaatggaatcaacgctctcttaataataccaaagatcaatgttccaatatagcctgttcctgttacaagtccgccgagtgcatagattccattctgaacggttggccatacaaaatagagcacgattccgacagccacataagtcaatgttgaaataatcggaacaaatcttgatccactgaagaatgacaatgcattcggaagctggattttgtaaaacttattatgaagtgctgctactccaagtccaacgataataccgccaaatacacccatctgtaatgtctggattccgcagacacttgtcacagttccttccagaactccggctccaagcgttccgtctgcaagaagatctccacggatcagaagcatggcattcattgttgcattcattacaaagaaagagatcattgccgcaagtgccgcaacctccttctctttcttcgccataccgattgctacaccgacagcaaaaatgatcggcaggttatcaaaaataacacttcccgctttgctcataattgtgagcagggaattcagaattgtcccctcgcctaaaattgcctgaagatgatatgtctcaatcatcgttgcatttgtaaatgaacttcctactccaagcagaagtcctgctaccggaagaattgcgattggaagcataaaacttcttccgattctctgcaatactccaaaaatcttgtctttcatctgtaatcctcctagtatcatttctcacagagttgacgcatcccatagtttcttgtgctggcacagttctgcaacttacttatcctatactataatgcgcaaaaaaggcataaactaatcctcaataaccaagtccaccttatctggtgaacttattaaggatagtttatgcctgctttaccagtaacactctatcgtgcgcttttctcttttaaccacgtatagtataaccaaactcacttccaacagtcaatctgtaatattcaacaatatttatcctgtttttttgttgaatatgttacttagtgatcattccagtaaatcaatttttttcttttgatttaaattattttctcttcattttatgcttctggcttttgcttatttgcttttgtaatatccagacgtacattcacaccaaatggattgattgcaactccctttgcatccggaatcagtatctccggaatcttatccgccgggattgctgctgtcttcatcttcttgccctgtgcaaatctggtaaattctatcatatctgtaaagatcggctgatacagacttccgtccggctgtctcagaagtggaacctgattatcttcctgaactcctacgataaaggttcctttcttataatgcgccatcatctcttcctgaagttccttcacattctccggcatctccggtccgatattgcggtgcatctcctgcatcagatacattgctgtcagatgaagctccggattctcgatcagtttctttccttcaggcagttcttccttattcttacgaactacaagatgttccagctgtaccctgatctcctcctctgtaccaacattcactgccagtgcattcacgcccattgtatacaggtttgtaaaaaatccaagtctgatattcttttcgatcttggcaattcctacatgataacgatcttctgcaagcgtctttgccttttcctttgcagactcttcctgataataaaccagaacctcgtcatcaaatgtctcttcatcacagaggacaaacggcatcttcgtcacacctgacatgatcacataaatctcttcgagatttcgcagattcaccaatacctgcttcatctctgtactgacaattactttattctcatccatctctttgttttcctttctggttgcttttctttatattacagtagcgtaatgaaatgaggtataaatataatacaccctatgatcacagccatgattgccgtaaaaagcactgcaccagctgccgtatccttcgcgatcttagcaagtggctttctctcttctgtcacaagatcgacaacagcttccactgccgtattcacaagttccagtgagatcaccattccaaaaaggagaagacagatacaccattccatcggtgttaatcctacaaatgttccaactgctgttacaagaatcactgcaaggcaatgaatcttcatattcctctcttttgaaatccctgtccagattccttcaaaggcatagccaaagcttttgaataaaggctgttttcgattcttcattcgtattctcctttcggattcgtatcatagatcaagcaacaaatctaatatctatgataccacatctgactccttatcaaaagaggtattttcctattattatcaaaagaatactctgatttcgaatcccagatccttttcacttatttacaagcttctaccatactctttacatattctgcaacatacggcacgcagtcttttccgtatttctcacacaacttaacgattgcacttccaacgatcgcaccgtctgcgctctgacacatcttcgccgcctgctctggagtggagattccgaatccaaccgcacatggaatatcattttcctcttttacgagcttcaccattgctccgatgtctgtcgtgatctcggatcttgttcctgttacaccaagtgaagaaacacaatatacgaatcccgatgcttcttttgcaatcatccggattcggtcatgagaagtcggtgcaatcaatgagatcagatcgattccgtactttttgcacacgatgtcaaattcttctttctcttcaaatggaacatccggaagaatcagaccatccattccgacatttttcgctttctcaagaaatctttctgttccgtaagagaacacaacatttgcatatgtcataaaaacaagtggaatctttgtattctgacggatttcttttaccatatcgaagatcttatctgtggtcacgcctcctgtcagcgcacgcagatttgctccctgtataaccggtccttctgctgtcggatcggaaaatgggattccaagctcgatcaacgccgcccctgctttctccatctcatagacgatctgttttgttgtctcaagatccgggtcaccacatgtgacaaatggtataaatgctttcttccctttaaatgcttcctgtattctactcatgaagatcctcccctctgtaacgtgcgattgctgcacagtccttatctccgcgtcctgaaatattaattacaataatctggtcttttcccattgtcggcgcaagctttcttgcatatgcaactgcatgtgcactctcgatcgccggaatgattccttctaatttagaaaggtactcaaatgcatcgactgcctcatcatctgtgattgctacatattctgctcttcccttatcataaaggtctgcatgctccggtccgattcccggataatccagtccggctgagattgagtaaaccggcgcaatctgtccgtactcatcctgacagaaataagatttcattccgtggaagattccaagcttaccggtcgcgatcgttgcagctgtctctgctgtattcacgccgcgtcctgccgcctcgcatccgatcaggcgcacgccttcatcttcaatgaaattataaaatgcaccgatcgcattggatcctccgccgacacaggcaagcactgcatccgggagttttccttctttttcaaggatctgctccttgatctctttagatataactgcctgaaaatcacgcacgatctgcggaaatggatgcggtcccatacaggatccgagtacataatgtgtgtcatcaattcttcttgtccactcacgcatcgtctccgaaacagcatcttttaaagtaccagttccacttgtaaccgcgtgtacctgtgctccgagaagacgcattctgtatacatttaatgcctgacgctctgtatcttcttttcccatgaaaacttcacattccattcccatcagagccgctgctgtcgctgttgcaaccccatgctgtcctgcaccggtctcagcgatcactcttgtctttcccatcttcttcgcaagaagaacctgacctaacacattgttgatcttatgggcacctgtgtgattgagatcttctcgtttcagataaattttcgccccgccaagatcttctgtcatacgtgctgcatagtataaaagagacggtctgcctgcatattcatttaataatgtattcagttcgtcattaaattctttgtcatttttatagtagttgtacgccttttccaattcgatcactgcattcatcagtgtctccggaatgtactgtccaccatggattccgtatcttccttttgtcatggttgtctctccttctttcttgtttctattgttttggtaaatttattcgttcacttgtatactcttttgttttcaaaaaatgtttactgctttcaaaatttctcacagttttcacagcttgaagaattttctcacgatctttctttccatctgtctccactgcactgctcaggtcaattccccaagggtgtattcgctgtattgcctccggtatgttctccggattcagtcctcctgcgaggaaatacggccgctttgtccagccttccaaaagactccaatcaaatgtctcgccggttccgccttttccatgatcgagaagaatcagatctgcactgctcgctgccgccgcatcaagatcttttttctcctgaatcgaaaatgctttcatcaccggatggtctgtcagacttttcaacttctttatatatgcctcatcttcctgcccgtgaagctgagcgatctgaatggttccttcatttaataattgtgcgacctcgccgcagtctttattgacaaatactccgaccgggtaaatctgcgattcaagattttgaaccagttcacgaactttcgaaatggatacatttctccggctctttggcacatcgatgataaatccgcaataatccggttttgcctcatttatataagtaatatctttcgggcggctcaaaccgcagatcttaatcttgggcatgttcattttttcttgtctcatactatatcttccgctaattcatatctagctgccttcctgtctgctgcttcaactccatcagtgctgctttccgatcagattttctcatcagaagttctccgatcagtaccgcatcggttccattttcataaagtgctttcatatcttccactccgcggataccgctctcagatacaaaaactgtttccgaactgaccatttctcttagccgaatgctattcttgatatccactgtgaaatctttcagattccggttatttacaccgataatctttgcaccgatcttctgtgctcttaagatttcttcttcgttatgtgtttctaccaaagcagatagtccgagttcgtctgccagctgatgatacgcttttaacctgccatcttctaataccgaacagatcagaagtactgccgaggctcccattgctttcgcctgataaatcatgtattcatcacaggtgaaatcttttctgagtaccggaatggatacattttgcacaatttctttcagatacgcatcactgccccggaaccaaaacggttctgtcagacaggagattgctgccgcgccgcctgcttcatattctctggcgatctcaacatatggaaaatccggtgcgattaatcctttggaaggagaagctttctttgcctcgcagataaaggataatccgtctgcccgaagtgcctgttcgaatgcagggatttgatctttaattcctttttcttccgcctgtcttcgaacctcttctaatggaactattttcttttcttcttcgatccgctctttcgtgcgttcggtaattttctcgagtatattcatactatttgttcctctttttctttcaagttgcttcttccattctcccctgcatagccggggatcagactttttatttattactttcttctttaaactgctccagcttcttcagtgcaagtccttcgtcaatgatctgttccgcttttcttacacctgcttcgattgaatctgcttttcctgcaagatagattgctgctcctgcattcaggcaaacagcatttctctttgctcccagctcttttccagaaatgatatccaatgtgatctgtgcgttttcctgaggtgttcctcctatcagtgcacctttttcgcatctctcataaccaaactgctccggtgtgatctcatagcttgtaaatgttccgtctttaatctcacagactgtagtcggtgcacacatggaaatctcatctaacttatcctgtccgtaaacgaccattccgcgaacgactccgagattcgccatgactcttgcaagtggctctacaaggctttcatcataaactcccatcagttccatgttcgctcctgccggattagacagtggcccaagaatattgaatacggtacggataccaagttctttacggatcggtccgacatatttcatcgcaatatgataattctgtgcaaataagaaacagatctgaatgtctttgagaagctgtgtgctgcgctccggtgcgacatcgatcttcactccaagtgcttcaagtacatctgccgcaccggacttagaagatgctgcacggttaccatgctttgcgaccgggattcctgctgccgcaatcacaagggaggatgttgttgaaatgttaaatgaatttgctccgtctccccctgttcctacgatttccagcacatccatgtcatgcaaaagcttgatgcagtgtgcacgcattcccgctgctgatgctgtgatctcatcgattgtctcacctttcatggaaagtgctgtcagatatgctgacttctgaacatctgatgccattccttccataatctcattcattacttcttctgcttctgtataggtgagattttctttctttgataattttataattgcttctttgatcatttcttaattctccttcaacgatttcgcatagttaataaagttctctatcatctgaagtccctgcggtgtcatcacggattccggatgaaactgtaacccaaagatcggatattctctgtgttccatcgccataatctcgttatcttcgcttcgcgctgtcacaaccagttcttccggcagtgtctcttcctttactgcaagcgaatgatatcttgccacctggattggaaatgtcagattctgaaacaggacactgtctgtctttacatctttcagctttgaagtcttcccgtgcatcagctgtccggcgtgacctacggttgctccaaatgcttccgccatcgcctgatgtccgagacaaacgccgagcatcgggattttttctttcagcttctgaattgcttcgatacagattccggcatcagaaggttttcccggccccggtgagattaccagcgcctcgggcgcaagttccagaatctcttccggtgtgatttgatcatttcgtattactttcacttctgaatcaatctgatctttttgcatgtcacctctttttgattctactcctgcgataaactgatacaggttatatgtaaagctgtcataattatcaagtaatagtatcattccaatcctcctttcgcaatttccacagcctgaagtactgcccctgccttatttaaacactcctggaattcattttccgggatactgtctgctacgattccggctcctgactgtacacgaatgtatccatttttcttataagcaagacggatggaaatgcatgtatctacatttcctgcaaaatcgagatagccaactgcccctccgtagatgcctcttttctcctgttcaagttctgcgataatctcacatgcgcggatcttcggtgctccggaaagcgttcctgccgggagaatcgcatctactacgtccagtgcatctttatctttccgaatcttgcctgttactgtggaaccgatatgcatcacatgggaatatctctggatttccatatatttatcaactttaactgttctcggctggctgatcttgccgacatcatttcgcccaagatctacaagcatgctgtgctctgcaagctctttctcgtctgtaagtagctctttctccaattcctgatcttcctcttcggtcactcctcgcttccttgtaccggcaagaggaaaagtgcacacctgtccgttttctaacttcgccagcgtctccggtgaagcccctgccacttcaatatcatcacttgaaaagtagaacatatacggagatggattcgaggttcgaagcacccggtaggtatcaaaaagacttccttttgccttcgctgtcagcggattggataaaacgacctggaaaatatcaccttcataaatgtattccttagctttctcaaccatcttgcaataatcttctttatccactcccggatggaactcttcttctaaaacaagtggtcggaaatctgcctgcgccccgcttcggatcaatcgttccatctcttctaattcctgcttcgcgttcgtataattttcttccagatcaccttccagcttcacgcctgtaatcaggatcagcttctgtctgtaattgtcaaatacgatgacacggtcaaataacatcaagtccgcatcccggaaatctcttactgccgtttttgctgctgtctttcctgtagtctcattcttctcttccaggactggctttaatgtcggttctgcatatttgatatagtcataagaaaaatatccgacaagccctccggtaaatggaggaagtccaggaacaaccggacttttatatgcttcgagaatttctcttagaacctttcccggatggtcggttaaaacttcccgtctggtcttatcctcatcttcatgcccttcgctgatgatcacacgcccatcggtacaggtgatctccatcgttggtgcatatccaaggaaggaatatcttccccactgctgtctgtcctccgcactttccagcagatagcaatgcttgcttgccgcccgcagcgttcgcatcacactaatcggcgtaaatgcatctgcatacagctctttgctgatcggaactcgcttgtatctgccttgttcagcgtaggatctgatttgttctaatgtcttgtccatgtgtattcctccttgaagttatgctgcaaaatgaatttttcttttatcccgataggaaatatatgtttatggtagaaaaaaagtccctgacagaatattcctattctgtcaaggacggtaaatctaaatcttttccgcggtgccaccttgattcacgggtacactcccatgcgctctgtaagatactaacatatctccggcaactgacgtatgccttcacgtcacagagtactcggattctcaaatcctttgactgtgccctcagcggtccatttggcaacctgcatctcgatccggctctcagcttcccggactctctgtgcgcgcataattactttgatctccgcttcatcggtttaaagcgttattccatttgctaggagtttatcactttaaagcgatagtgtcaatgcactattttaatctttttcgcgaaattattgaaaaattttctcaattttcttgtccttattttctttttctcttccatgcaaatccgccaactcctgctccgagtgaggagaatgcaagtcctaataagccaagaacatttgctgggtcacctgtctttgcggcttttgatccacttgttcctttggaagctgatccatccgtagttgttcctgccttctttgtaacagtcggagttgcacttccattctgacttcccgcctgatttccattctttacaagtgctttgattgctgcatttaacgcatctgttgctttatcaactttttcctggctttcttttgcatttaatgcgctcttagcgtctgtcagtgcactctgcaatgccttccagctgtcaactgtgtaatcagcttctttcagagctgccgcatcactgattactttctcaagggaagaagtatcaactgctgccggctcttctatcttaacaagtgcttcaacagctgcgttgaggtggcttactgcctcgtctacagttgcctgagtttttggatttttcaattcatcttttgcttcctgaagttccatctgcatagatgcccagctttccgctgtgtattcagcttctttcagggcttctgcttttgcaatagctgcctcaagctctgttgttgtgattgttttatcctcagattcttttacaatgttctcctctgttgcctggaatttgtatgtcacgtcattatatccaaatgctgtcagtgtaatggtccaatatcctgttccatccgttccttccggaagtgtacaacgaagagaatctgtcagtccaagctggattcccattgctttgtgcatccagttatctgctgcaaattttgttccataagtagcttttgcatttgtatatgtgctgtcatctccatagtaagtccatgtaacagtctggagatttgatccaagatcaccataatttcctgtcagatcaactcttaagaattctccataagatccgcttgcttcttttactgtcagccctgcttcctctgctgttggtgctgtcttgagtgcctgatctttgattccggactctgatccattattcactcttgcagagaaactgaaagatccatcctcattctttgttgctgttttcagaccgtttgtattctctgttacattggcaaccagtcctgtatagcttaccagattcttttctgaatatcctcctgcaagttcacttccgttttcgatcacacgatagcttgctttcagtgcatccagatcagatgtttttactttcaccggcacatatttcagtccgagtacatcatactctgtcatctttgttgttgcaccggattcttctgtgatctctcctctgttaaatgtaatcttgcttccgtctgtcagaactgcagtagttccatctgtccagtactctactgcatactcttttccattttccgccttgattactgcgttgcactggaaagaacctctgtgaagtccatgatttactgtagctcttgttacagtatcgaatgcacccttgtcagactctccttttgaatcctttgcatctgaagaagatgtatttcctgctgcctgcacattttcagcagcccagtactctgcccagctaagtcctacatatgcgtaagtatactcactctcctgtgataaagtataagtgaattcacaatcctttgcatagcctgttgctttcactgtaatcttaaattcctgtccattttctgcattcttaaacggagctacagttgtatcaattgttccatcttctttgatgatcttcactgcacgttttcctgttgccgcatactctgttccgtcaactgttacagattcgatattctttacataagaagttacatcctctgctgcatatccttccgccgctacaagtgctgcactttcactgttaaatacaaccggtacagcttctgttgtcaattcaaaatctgtcgtaagatctgcatattttccggatttatcagatactttcagagtatatttgcctatctcagcgccttttgtcttataggtaagtactccgtcttttacctgaacatcctcaagaccttcaactgtatattctgcctgataatcgtcaggaaggccttctacagttacatttacttttccactttcaacatctgcattctctgctgcgatagttccattgaatttaaccggcacatactgatctgcatcaatctcatagattccattatctgtgtaatatgtgattttattgattgtctgacccatcatcttttcataattttttgagtccagtgtgtttccatgagatgttgtcacaaatcctgtactccatgccagttctttctttttccagatattttcaagatgacgaagtccgtagttgtctccttcttttgtgctgatcacaactccatatactgtattaactgtttctgggagtccatttacatctaattcataatctccatactttgtatctgttgtgaaatcaattgatgcatcactcaacttctgtgcagttgcacctttcacttcactaaagctgagtgaaccatctgcatttactgttgcttccttataataggaaggagtctcacttaaaatatagtaagaatagcttgcgctctcgaataacgcatcttttccattatattctgttgttgtctcttttcctttcatattcactgtaatagaaagcttgctgtcatctgtgatctgtgtatagtttttcagtacagatgcatcactaatcttaaccggatatgtaatacctgtaatatctgttccatcactgtttacatgataagatccagctacaagtgttgatcttgttttcgcttttgtagcggaggatacactgtctgctcctgctacctgatcagctgcataaaattcagaatatggaatattcatcaacacatacgtttctttcacaacttctgcctttttcaatgccttcactgctgcattcaactcatctgccgctgtgtccactgcactctgggattcctttgctttcagagccgccttcgctacagttaattttgtctgcattgcactccagctgtctgctgtataatcagattctgtcagtttctcagccgctgcgattgctgactccagctttgctgtgtcaatggtaactgtctccccagctaccggagctgactggattgcttcaagtgcagcttttttaattgcatcagaagtacgtgttgcaccggaaactgtatcccagctgttaattgtatcttctgtagcagcctgtccttcaagctttgttttaaatccttttgatttggaatatgctttattaaagtaggatgcattttcttcgtcatatccttctttcggtgtgactgtgatctcagagaattttccatcctctactttcaagcttacttctacatcatattcttcccactcatcgtcactgtcatcttctgttctggttacatgagccgtctttgtataagttccatcctttgcagtctgacttcctgttgccgcaaagatcgttgacgggcaaagtcctactaccatagacattgccactgccatggacattgcctttactttcatttctttgtttttcatagaaacctcctttttaactaaaatagttacatacagatcctgcctgtcgcagttctgctttcctgctcccgcatggaatatattatcaagttagcttttactaacctgtaatcaaaaagtattattatctatactgtccttacagcttctttcttcacaaccggtaaaatctttcctgcgacaattccaatcacgaaccctgtcactgttcctgccacaagaagaaccggcagataataaatcagtttcagattctccaccactgccatcgcaacaaaaatctgtcctatgttatgaaagacgcctccagtgatactgactcctacaatggaaattccatccatcttctttacaagtaccatggcaagaaggctgacaaccgcccctgccagactgtaaatgatcgacattccatttccaaaaagaaatcctgtcaagagtacacgcagtacagataccgccagtacttccggaatttccagaaaataaagacctgttacagtgaccagattagccactccaagcttcatccccggcactccaaaattaattgggatcaggctttccacataactaaaaatcattgccagcgcaacaagcattgccatgttcgcaagttttttatttctattcatacattctcctttacagtcgaacaattgatttatttagaaattgtatccggtaaatgttccttttcattttgagaatcatcagaattctcaacctcttctatttccacaaccagcttgtgaggcaggcagacaattgtctgtgtccggttattgatctttccctgctcttcgcaatatccatccggacagtcagcctcttccatatacgcttttccatccttgatccggacacggttgtaaaaatccccttcctgcacttcgatcacctggtcttcatccaaagcatatcttccgtaaacttctccagccaccttgatcacaacctgtttttcctgattttctttttgtccgctttcctttgcctgtacatactgcatcagattcatcacaagaaacagtacacatgccgcaaagaggattccgcctcctaaaaacagatcttttttcttcatctattacactcctgcccagatcataattacaagtaacagaattgcccgaagaatcgtaaaccagaattcatttcccttcagacctttgattcctgtatggatatgcttctttggacaggtatcaatacatttctggcattggaaacaatctccctcgactttgagtgatccgtcttccgggagtccgatcccggatggacatttcttcgtgcatccactacagcccttgatacaattttctctgtcgcggtgcaatgcaaagaacggaagcaccggaagtaatgagaatactgctcccatcggacacagattccgacagaaaaatctttcttccagacacatccccacaataataagaagtagtaatatcactcccggcaaatatccctgcaagcgaagatttcctgcatgcaacatagaaaaaacatcccacgggcttgtcccttttgcctttccgtatactcccgcaaaacaaagtactgcgattacggtcaacaccagatatttcaaatagcttaacttctctgtgatcttttctgaaagtagcaccggctttttctttctcttcttaaagcaccagatataaaatgcatgaattccatctccaagacttccgaatgcacatgcgaatccacagaagaatcttccgaaaagaatcgtatacgcgcaaagaacaaccagcacagtcacaaaagggggcatcccgattgcctcacctactcctatctgtgtgaaaatatattttacaccggcaaatgctgttgtatacacagatggcagaaacagaaaataaaggatctgaatcaaggcacgaagccaagtatgcaattttttaatttcttttgcttttaaattatgtatgtttaacttcttcacactactctaccgcctgttccaatgcctgttctgctgcatttttaattcctgtcgaactgaacgttgcgccgctgatcgtatcaacttctgcactctgcgcctctatgatcttcggaatgatatcttccgccattgcaagatatgcactgtcttccttctcggcggaagtcacttctaccgcttcaatctttccatcttttacagtaacttctaccgcaaccgttccgccaaatccatccgcttctccggtataggttccatccttgtatcctgctccatctcctgaatcactccctgactcagaatcactgccggcaccagatgactgtatctccaactgtgcattcagttttgcgatttcctcatccttcgcacggacatccaacacttcattatatccgaaaaggacaccgacgattgccagcagactaaacagtcttacgataaactctttcatcctactgcgcctccgtctcttctggtcttaaagccatttccagtgcctttttgcatccgtcaataatcgcattcgaagaacaggttgctctggataccgtatcaatttcttccggcattcctttggcaataatctgggaaacgacaccttttttgcttgaagttccatttgccgccttcttgatatagctgtcatttgctgcatccccatctcctgacacgtcagtaatggatacaattttgtcatttcgtattgtcaccttcatagaaagctgatactctgtaaaatcttcatcctcatccggtttacacggtacactcacctcataagttccatcgatgtattttgtcttcacttcttcctcttgatctgacttctttttctcaagctgcgcaactgcaaggttcaggttctccaccgctttgtcaacagcctgctgttccactgtttcattcgcagctatttccaacagctcttttgcatcattcagtcggagactcagaaccgcccagctactctgcgtatactcctccatcacaagtgcttctgctgacttgactgcattttccagttccgttgtatctgctttctcttcaatggattctccattcgttactttctccgcctgtttcaaagcattctttattgctccgagaagtccctttgaactgtaagttgcaccagatacagtatctacatctgtattctgatttttaagcacatttttcactacatccattgcgcggttgaaaaatgcttcatcatctgatgtctctgtgactaaaattgctttgatcgtatgctcctggatcaccacagctaccgatacatctccactgtatccttccgctgttccataatagattccttctttgtatggaactgttccggttattgatgtactctgatcctgactggaataactgttcgagctattcgtttcagatggatccgaagtcgctccatttccactcactgccgcctgacttaatgcatctcttactgcctggatgattccaaccgaactgtacgttgctccagacacggtatctacattggtgctctgactactgatgatcgcattgatcagtgcagaggctttggaaatgtattcgcttccatcttgattctccataatctggatgtctgtgatctttccgccactgatctcaacctttactttcagtgttccgccaaatccagtccctgttccgtaataagttccgtccttatatgctgccgggtcttccactgttgcgacagaagtagaacttcctgctgccgcgccgccaccagactgtgactgtcctgttgttccgctgtctttttctcctgtcagtgcattcttcaccgcactgatgattccccgggaactataggttgcccctgaaacagtatcgacttccaatgtctgtccttcgatgatcttatcgatcactgcctgtgcacgtttgaaaaatgctgcatcgtcagatgaactcaaaatatcaattgctgtgatctgcctgtctttgatctgcacagcaactgtaatatctcctgcataacctgttccagttcccttataaacaccatccgtcagatcaaaagaaccttttaccgcctgctcctgctcttctgactttgtagtctcttcttttacagaattcgtttgctcctgcgctgcataaaccggtggctgatatccactcagggagcctgctacacaggatgccacaactgctaccgaaagtaccggtgcaaatggtttcagcttctttcctgtttcttttaaatccatttttcctccaaaatctactctgtcttacacttttctatcgaatgatctcaactgttctctccgttgaaaaatcattttccagcccttctgttacatatagcgtcccatcgtcactcataaggattgcatcaaactcatctttatgttctctccagaaatctgccgctttctcttctcccataataaaaagtgaagtagaaagtccatctgccagtgttccgtccgtacttacaattgttacagatacaagtccgctttctgccgggtatccggtctttgggtcaatgatgtgatgatacgtcacaccatcctgttcaaaataccgttcgtatccccctgaagtgataacagccttgtcctgaacactcagaattcccagataatcttcagtgtcatcgggactctgcactgcaatcttccatttcgttccatccgtctttgttccgagtgcctgcacatttccgccaagattcactaatccacttgtgattccattgtctttgtaaatgtccataattctggatgaggtatatccttttgcaattcctccgagatcgattttcattccttctacgccgaaagatatctttctcgtttctttgtcacaagaaatgtttcccgcatcagtgagtggaagaagttgatccaatgtctcctgtgacggaacctggaagttctgtgttgggaatccccatgcttccatcaccggataaatcgcaatatcaaacgcgccatctgtttcctggtagagttccaatgcacgttccgtcagataacctgcatcttcggaaagctctgcacttccatctgcgttcagttttgcgatctcgctgtcttcatctcctgtcgataaaagtgcgtccagacgctcaatctctgcctgtgctgcatcaacggctgcttctgcattttctccatacgcagtcactgtcatataggtatccattgcaaaaacatctctggatacttcttgtatatcatccgactggttctgtgcactttctgacgatatttcggatttatctgctgtcttctgtccgcatccgaccaacagggccgatgcacaaagacagactgcaagtaaacattttatattttttaatttcatgtaatcgctcctggttatgcttttctaactcgtgttagtccaactaactccgtaagtatacaggatgtctattatccagtcaattggatttttattatttgagaacttttctcatttatctgttttaaacttatatatttttctcatgaacaaagaatgtgcctcggcacattcttgcgcctgcggcgttgctaagcgccagtggcgcttgtttagcaaggaccgaagtggaaacgtagaccgcttgcaacacctaccttgtacgccgcagtgcgcatcctgagcggagcgttttttatatattaggaaaggactttcctaatatataaaaaagagagacgaaaatttcatctctcttttccttcgctttatattctttttttacttcctcgagaaaatatgtttcacaaatacatagatcataatcaccactgccatcagatatccgaaggctccaagcgccgggattcccataaacttcggtgtcatatccgttgtacagataatacttgaactgatcagaagtgccatgacccacagacccataacaatatttcttaccaagcgtctcaaaagaaatgcaagatcttttgacacacgcagatccaggtttacttttgactgacctttcatgaattcatccattaagtccgttgtcatggatggaaggtcaatcatcttccgcacagatttcaaaaggcttcttcctgtgttcttcaattccttcttaaagttaaaattgtgaagaaaatccgcagcaagtcttgctctggcaatctccaccatattgatatccggtgcgatattggaaagtacaccttccatatgcgtaagtcctctggcaagcatcgtcagtccatgtggcatcatgatcttattttctttcatgacttccatcagatccgtcatgacctctgccacattaatcttgcccatatcggtacttccgtatttcaaaagcaatccttcaatatcttcgtaaagttttctctgctccggtcgttctttgaattcgcccaatccgagaaccgcctttaggatcagaccaacatcattcagtgcaacgccttcgatcgcaagcgtgatcatctcacggtcatgctctgtcagtcgtcccatcatacccatatcaatccagacaatctttccatcacggatcttaacatttccggaatgcggatcagcgtggaagaacccatcatccattacttgcttaatatagttatctacaagtttgcttccaatttctttcaggtcatagccatcttcgagcagcttatccttctcatcaataccgcaaccatcaatatattccatcaccagcacatgaacggtcgtatactgctgatacagaaccggtgtctgaacaaaattgacatctttatttcttctggcaaattcttcgatattcgatgcttcggtcaggaaattcatctcatctcttgtcactgaccagagttcgtcaagcacaagatcaaaatcagccattcctttcagactgatcggcggcatcagcttgattgctttacggataaactcaatgtcccgcgccatcatctcataaatgccttttctctgaatcttaacgacaacctcttctcctgactttaagactgctctatgtacctgcgcaattgatgcagaaccgattggcgtctcttcgattgatgaaaaaactttcttccaggagcgtccgtaagactcgtcgattacagacactgcctcctcgaagggcatcggtcttgcatccgtacataattccatcaattcatcacaataggcctttggaagaatgtcagaatggagtgccatgatctgtccgatcttcacaaaagtcggaccaagatcctccatgatcaaacgaagtttcttcggactaagtccacgtgtaatattatgttttcgaagtacagaaataatctctctaaatcttgaattatttgttcccttttctttctcactcatatctgtattctcctgctgtctcggtgacgagttcctcttttcttcagtatcccttgctgatagttcaaaagtaatagtcacttttttctttcttgagaaagcagagaagccgcttttcggcagcttctctaatatttttactcttcttttgtctcttcctcaacaacttctgcatcatctacattttcaacatcttccgctgtatcttctgcatctacctcttctgcttccgaatctacggttgactctttcgccttgatctgagccttcagtgcttctaactgctccggtgtcatcttgtcgagaagttcgctcaactcttccggtgtagtgactttgactttcacattcacattgttctttactgtctgcttcagattatgcttgagttcctcattcagaaccttgccctgctccactgtaagctcgcctttttttaccatatcatcaagaacgtcctttgacttctctgcagttgtagcaaccgctccgattccagccagtattaccttctttaagttgtctgttaatttttccataatgcctgtctccttccgtaattgttctgtctcgcatcacctgtggagatgagagtcatcacatatatgatatttagattctacaactttctcattatttcgtctagtattctagcccattttctgtacttgtttcacaataatttaataggttctttataaattccaatactttttcacaaagaaaatgcctgaaatgttacatttttaactatttgtaacttttcttttctatttccgattgttaaaataaaaacataaagtaacgggaatgaatttcccgaaaatctgtttttaaaaaaggagatcgaaaatcatggcaaacagaattatgttaaatgaaacatcttatcatggagcaggcgcaatcaaagagatcgctacagaagcaaaagcaagagcatttaagaaagcttttgtatgttctgaccctgatctgatcaaattcggagttacaaagaaagtaacagatattcttgatgaaaatggacttgcttacgaaatttattctgatatcaaagcaaacccaacaatcgaaaatgtacagcacggagtagaagcattcaagaaagctgatgcagattacatcgttgcaatcggtggtggttcttctatggatacttccaaagcaatcggtatcatcatcgcaaacccggaatttgaagatgtaagaagccttgaaggtgttgcaccgacaacaaaaccttgtgttccgatcatcgcagttccaacaacagccggaacagctgctgaggttacaatcaactacgttatcacagatgttgaaagaaagagaaaattcgtttgtgttgacccacatgacatgccggttatcgcagttgttgacccggatatgatgtcctctatgccaaagggacttacagcttccacaggtatggatgccctgacacatgcaattgaaggatatacaacaaaagctgcttgggaaatgacagatatgttccatatcaaagcaatcgaaatcattggaaaatctttaagaagtgctgttgcaaatgaaaaagaaggccgtgaaggaatggctcttggacagtatatcgcaggaatgggattctctaatgtaggtcttggaatcgctcattctatggctcatacccttggtgctgtatacgatactccacacggtgttgcatgtgctatgatgcttccaatcgttatggaatacaatgcagattgtacaggtgagaaataccgtgaaatcgcaagagcactgggcgttaaaggtgttgacgacatgtctgttgaagaatacagaaaagctgctgttgatgctgttcagaaactttctgttgacgttggaatcccgacaaaactggaagctctgaaagaagaagacctgcagttcctcgctgagtctgctcacgctgatgcttgtgcaccgggtaacccgaaagatgcaagtgtagaggatctgaaggcactctttagaaaacttatgtaaattgatttctggtacacggacgaaaattcttcctgtgatttgggttagagtttcgtcttcgtagaaagggacagtgcagttggctcagggttacgcacactgttcatactaagaaaaacaacagattgctaagaacaaagaaaggatcgataaactcgctgccgctcagacagctatcgatcctttctttaacacaatctatcgtttttcaagtatgagcaagtatgctccacattcaccaactacactgtccctttctacttcgattgtactctatcgaatcatagaacgaatttttctgtggacagaaatagatttacaacaatccacgttctttaaagacgtctcttagttctgcgggcatggattcggagaggaatctagccagggtttcgggggtggctttgtgattgccgagaacccattggaccgtcatgtaaatggagccttggcagtacatttctaactgaaagcgaatcttgtcggacatctttttcccggtgtttccttcgatacgatcggtataaaattgtgtgatcagttcaaagtcgtgatcacgcaaacagttctggtcgtcatttttaaatgccgcacgaaagaaaagtgtttctttctgaatgtattggaatttatttacaagactttcatagactgtttgtccctctcccatatgttcaaaggattcaatcagtatcttgtcaaaataccagttgatcaaatcgtatttatcctgaaaattccggtaaaaggtctgacgcgtcactccgcattcttctgtgatctctttcactgtgatcttctcaaccggagcttttttcatgcattctttcattgcctctgccaaccggtattttactttttctcctgacttgtatgtttctgccataactttttcctttccactccaagcagttcaagcagttcttcatgcgggtattcttcgtcttcctggtaaatatccacgtaattcattgcagcgcctccatctacgaatgcaggaaacaggaaaccgcattccggttcgcccggttcatattctccgcttagtggacagatcacgcataaaatgtattcatacattcgttctgattctccctgacgtatatgatccagccccttcgccggaatatcgtatctgtcatgaaaaacatagattgcataatcttcatctgcctgataatgttccccgataatctcataaaatgtctccatcagagcatcatttttcaagccacaggcacgcatccccatcagaagcttccacatactgtccggatttctttgatcatcagaaaacttatattccttcagatttttatttgttttcgcaaacggcactttcttcgcaagtgccagattcttctcctgttctacaggatttaatttcagaaaactggtgttaaatgttccgtcaataaatccgtctatatccatatatcccccggcgatccgggtgatcgatgtccgttttactgtcattcgtctggtcagtgccagcatatcttctcgattgatcataatcttttccctccggctctctgtttatccctacaaatctctgcatatctctcgacagctttctgttcgtctcaaacatcttccgcctgtctacatcagagattcttctgtcttatccgctctgtcaatcctcgaagcattaacggttccacgccgctacttttttcttcctctttttcctccgcctgcatgatcacatcacgcaccttctgcattctctcatcaagagctgagctgatctgtgcacagtccatcatctcttctgccagatacttactctgatcttccggaatactctttttatagcgaagcttatgctccaggctcgcccagaaatccatcgcgatcgtacgaagctgcacttcaactgtgatcatcttttttccttcttttaagaaaatcggagtcttcacgatcagatgaagacttctgtaaccacttggctttggatttgcaatatagtcttttttttgaattaaaattacatcgtcctgatcaaggaagcatttcgcaagtttataaatgtcatcctgaaaagcgcagatcacacgcacaccggcaatatcctgaatattttcttcgattgcatcaatcgtcaatggaatatttttacgacgaatcttcttcagcagactttccatagattttacacgcgtcttaatactctcaatcgggttgcggtcatactccagcgaatactgttcgctcagcaccttaaatttcgtctcaacttccatgatcgcacactgataataagccatcatcgtattgaccggctttaaattctcctgtacaaagtcaataaattcatctgaaagaagactgtttcttacaaagtcctctcttcttttctcgattcgttcttctaattctcgtctacccatttgtttctttcatctctcttttcttgctttttataagattgacctgatcagatacttccattctgccagatattctctaagcatattgtttggcagatacaatggattcgagcccgcagcaattgctttcgctgactttaatccctcaccttttgtaatctgcattgcccgaaacatatggaaatcatttgtgataattcccacacttgctccgtctttcatatattttttactatattttatattctgctctgttgttttcgattcgtcttccagaatcaaacggtctttctcgattccgaccgcttccatataatcagccatcgcctgcgcttccgtacatggctcgttatacccctgtccacctgacacaatacagattgtctccggattcttctccaaataatcgatcgctgtgttcagtcgatgcttcagcaccttactcggtccatctgctctcacctgtgcaccaagcactatgatgtagtctagattttcatctgccttcgcatgcatctgactaataatgcatccttcgataatcacaaaggaaactacaaatacaagcagtattccccttaatatccacaacatccacatcggaagtcttgcccatccatccagaaatgtaatcgctgcgcatcctccaagcaatgcagccaatacaaaccagatcaggaagaatcccgtcccagatccattttcgctcatccagaatccataacaggcaaataacactgtaaataaaatacatattataactgctgtcatttttcgctttgttctcactttccactttctccaagaatcagtcgaagcagtgtcttatcaagcatgattgtccgatcccagggattcagaatgataccttcaatctcattctcctgtacagcagactggaataatggttcgattgctgtcaaaaatgtagacatcacactattagaaccttttaattcttcctcaaaacttgtaaatgcactccaccacttctttccatcagctgtcttcactgcctgtatcttcagttgttctgcaacagaaggctctaccgcaagaatcaattgtccttcttctttcattcgtctacggatcattgtcaacgcatgtgctaaaagttcctgagatggttcctgctggagtgcaaaaattgcttcctcaatcttctcgtttcctttcagtccttcatcttttgtatcgttattctgcatcttcatccttgctactccttgtaagttacttctatttttaataaatcatctcattatttcatatctgatatcatctaagtatatcataaaaagagagaataatgtgatattttaaatttgtttcacactattctctctttttttaattttcctcaatatgactttggattcttcccatttatctaagacacaagttcctgcatcagctcatgtacactcatcatctgattgatccgtccgacattacttccgcagaacacaagtccattttccacgtcacctttgaccgcatcaatcaacgccttcgtgatacagtacggaacttttcccggattacattttgctaagcaattataacatttcttaataggctctttttctttctcgacacgctcgatcaatgcattgcgaagagcacgccccggcattccaaccggactttggataatctggacatcctcttcttttgcattgatataggcctgcttatacgcctctgacgcatcacattcttctgttgccacgaacctgctcgcaatctggactccgtctgctccaagttctaatgcgtgatcaatatctgctctgtcgaagattcccccagcaacgatcaccggaattttcttcccatagcgcttttcatactcttccttgcaggcaatgatctgtcggatctcctcatcataatccattgtgtcaatctcatttaactgctctcttgaaaaaccgagatgccctccggctttcggtccctcaacaacaaggaaatctgctgttctgtcatacttatgcgcccacattttcaagatcagctgcgcagctcttttagaagaaacgattggcgcgatcttcgttctgcaagtctcgctgaccagctccggcaggttcatcggaagtccggcaccactgatgatcacatctgcacctgctgccacggcctctttcacatgctccgcataatgcttcagtgcaaccataatatttacaccgacaagaccatttccctgcgcgagttcctttgctcgcttgatgtgcttgtggattgctctgttgttacatgcagcctgatccttctcaaacccttcttcatcataaccaatctgcgctgtcgaaataattccaactccaccttctttcgccactgctcccgcgagagagcttctgctgactcctacgcccataccgccctggataatcgggagcttcgcagtcagatcacctatttttaattgtttgtttatactcattttcaattctcctgtattttattttgaatttcaaactattttaagtataaactattttgttgaaatgtcaaggaatattgattctacggattaatccgcagattaaaagcccctgttttgataggctcttgcaattatcggttcttttttctgtatagatttcctgtttttgtagtttttcttggggaactgttccagcgatattctttgacttgcttcgcgattttgcaattctcggacaacaatatcccctctcttcgttgacttgaacactctcaccatgctttaacaatggaatataattccctttctgctttaaaatcaaagaatcctttctattctgcatattttttcatgacagtctccttttatttttttaaaggtttaatttccgtgacaccacctaaagaagcaggtgatgtatcctctacagcgccattgtatgtcactataaccaagtccccgacattaaaatccgtagattcttttccaaccaaatgtaccctatagtcattagaatactttaaatcttgaaggatcagataggtatcgtgaacttcaagaacttgtaattctatagatttttgaagttttgtatgtataataaaaaataatagaaataaaatacatacaaaaaaaacaactttcataatatccttatgaaaactttttagatatccacctttcctcagttcattattcttttttaacaaaaaaatcccttccttcacgctttttacacgctttttatattggtgacatttattgatcattcaaatatttcatattgctcttgtttaaccaactctgattgaacttcttcaatataacgattataattttctattgtttcttctgcttcttgattatttgatcgtgtagaaatactattcttcaaatattcttgttttaatgattctaaatatttttcaattggtaaatttatcttataaacttcaaattcatgctgccaatattcttcttccgaaccaaattgacttataagagcctgagcctcctcactattaatcgaatcatttattgtaacttttaaatcatctaaataatcattgatttcatcatcagacacagaatatcccactgcaatagctctttgataagttgcatcgcgttgtaacatatattctactgccttatcttcagcgtctgactgttcataccctgctaaaatgtaaaattcagtagcttgttcaatatcctttgtagtaataacaccaccggatttacctcttgcgtaaatagactcatctgttttatctcgatagggatccaataattgtccggctttcttcatcaaatcaatattagactctttttcatttatcacatagatattctcgactttaagtggtcgaacgtctgcattatatgggaaatagtaaaatataatttttttaccttcctttagattttctaattcataaccacaatttctacaatctaactgcagtgtatcgacatttttaaaatcctcatcttgttcattcaatttatccaaacgaacaactataatattcttatctatagattctactatcccacttctgttaagatggtatacccccgaagaatacattgtgtcatttcttttttttagtcctaataatgccaaaagcacccctaaaatgcataagacatatattatttttttcttcattaagtttcacctcactccattgacttgctgtgcatttttgctgttttcggggaacagttccggcattctttgacttgttcctcatttataaatataacacaattttatcaggatacgaagaaaatgtcagccagaaactcctcttctctacattttcccagtcttttttatgaaaccatatggaacatatttcatacggatacgtaactactttctcttctcctggttctaatttttctaccatagaaccgtaatgttctgaatttcccattagaagttcctgtgagattgctgtcccaacgcctgttgtctctaacgacagataagtgattggcacttctttttcttcctccgttgtattctttaaacatacactcacttctataatttttgtaataaaagatgaaagcgtgttatggaatttaaaattagctattgaatataaaaaaataaaaagagaagaaaaactgaaactaatcaataagtatttaaagcagtttgagctaagtgacttctaaaagaattaaatgaaaaaggctttacttaccacctactccaccagatgaatcagccgtatattaaaaaaaagctccgatcgtagactgtatttgtccaacaccttcccataattcatatgtatgctcgccaggatatcctgttaaagccattgtattacctacttacgttcaatcttttagaagacgatatcaacggcacaattagtttcgttgatcctcggttatcttgattatttatgcaatcataaataatggtttctcctaaaacaatatagaaagttatctgaatatagtttcagttgcatcattttatatcaagcatttttcggattggatattctgcaatttgcagttgtggaggatctttgcgaagttcttctatatctggtgcatttcctgctataattgcataggtaagatacactgtcatatctgtaccaggacgaagagagaatcctccaccaataggcatagttggatttaagtgaggataggcaatggcattaaatacaaccatatagtttttgcttcatattttctgcatatccttcatccaaaggttcattgacgttgatgcgccttgcaatgttatagcattcattgattaatatccgcatcaaccaggtctttgcatagcgatctttttttaatgtatctattttagaaaatgctttcacaatcgattcttgtattgcatcagcacaatcctggtcatctgacaaaattgtttttgctgttgcatacaattgtcgctctgatgaaagaatcaattctccaagtgcctccttcgtcaatttggtaccccctttttgccagccagcttttatttacatagattagacggattcaaaacgaaaatatccccttaattttcaaaaataattgttttttgtttcaagcgagctctaatatttttgcagttttcttatattatctcatagattaactcattcatataaaagaaacatcagcaaatcattcattaatctactgattattgggacatttacttttgcttatatcattaattctactttaaacctattgaattcgataggtttaaaattcagaaagcattttttataacatttgatttcttttattaattatgctaaaatttttatataattatcatatttatgaagggaggcattatattggcttcaacaattcgagatgttgccgctcgtgccggactttctgtcggtacagtttctaaatacattaatggcaaaactgtaaaagaaaatactcgtttagctatagaagaagcaatcaaagaacttgattttcatccaaacaatatcgcaaaaggactgcgtaatgcgaaatcattttctgtcgctatcctattaccaatgttaaattccacattttgtacttctatgatttcatcaatcgaatcaacattattacctttaggatatagtgttattgtgtgcgaatgccacaacaatgcagaaatggaattgcgaaaaactcagtatctaattgatcgtatggttgatggaatcgttctgattccgtacgcctccgatggtaaacaaattgaaatgattcagaaaagtaatattccattgattctacttgaccaggaaatccaagatcatgcaacagattgcatcgttcttgataatgaactggcgggatatgaatctactcaacgtttaattgatttgggacataaagatattgctattatcaccggaagtccgaatcattatactagtaatggacgtctaaatggatataaaaaagcgatgacaaacgctggtttaacaattacagatgattatattcaatgcggagattactgtatagacggtggttatgaagctatgatgcgtttgtgcaaactccaaaaaagaccaacagccatattcatcagtaactatgatatgactattggtgcttatcttgcaattaactatttacgattaaaaataccagatgatatctcggttattggatttgacaactttccacttgcaaatgtagtaaatccaccactgtcttttgctgaacagcctactaatgtcatgggcacagaggctggaaaacttctttacagacgtatttgtggtgactactctgattatccaaaaacgataatgcacaaaccaaccatgcattataaggaaagcatccgtcaattaacatgattaaatccattcacaggagtgcagatctatgatttgctgctcctgtttttttaattctattttttccgctaacttcttatttccataaaaaatatttataaactgatctacagaagaacaaagtgaaatcgaaattggttttttatttttccatgcgatatccacctcaactccgcctacagccagaagaccttttacttttccgctttcccaactctctggtaatgctggaagaatagtaatttttccatcttcactactcaaaagcatttcagcaacagcacttgcacttccaaaattaccgtcgatctggaatacttcccgttctccttccgtttcacctaatggcggatgaaggtcaaaaaggttgttataaactgattgccgtaacaactcttcatagtagtaattagctttcgttccatcacctaatcttgcccacaagttaatgagccatgcacaactccatcctatttgctgtttatagtttgcaaccttttcttcaatgaacttctgacatgcttttactaattcagtatctgttttctttattgagtgtcccggatggaatccaaataccggagagaaatgtcgatgtccaacatcaaattcttcgaaatctttaatccattcctgaatctttcctgttcttccaatctgataatttggtaataacttactgcgctcattcacttgctcgatcaaatcctctttgattccaagaacattacatgcttccaaatagttagcaaataattcttttataattgctaaatccattgttgtcatgtaactcacgccacaaacatgtccttccccatctttaaatgtattttctggtgaggtagaaggtgctgtataataaagtccatcttccctttgttgtaaccaatcaagacaaaacaaaacagatcctctcaatgatggatatattttatttttcaagtactccaaatctcttgaatatctatagtattcataactttgtgagcacaaccatacaccgcccatcggccagtacgcatatttaggttcgccatctactggaccagtctgtctccatatatcaacattatgatttgctgtccaacctgaacaatgacactgtttctttgctgtttcttctccggcatgacttaattcttcgacgaaatctacaaatgctgtaaagctttcaattagattacatggcccgttaagccaatagttcatttcggtattaatattgattgtccagttactgctccatacaggtcttatactttcgctccaaataccttgtaaatttgccggttgggttccttttcgtgaacatgctatcatcagataacgattataatggaaaaacagacatgacagccccaaatcctgttttccattctgaacacgtttcaaacgttcatctgttggtagatcattttctatttcttctaattcaagtgatacatttttataaacagattgataatctgctatatgttcttcctcaagttctttatatgattttgaattcaacttctgaatctgattaccgcagctcttttcacacacttctggattcgtttcaatcctttgattgtatttcttatatccatccgctgctgtcaagtaaaacactacttcttcagcttcttgaattttcaaaccgtctaaatctgcactaaccgttccacctttatgagtaacctgcaaataacaacaaaatgccattcctggattcttctcatcatatacaatcggattttcgcaagcaacataattaggttgtacattagacggtgcatttccgcttacatacaaacagcaatccttttctgtcttgattgtatgctgcacttcgctatcaagcttcactttcaaatccaatttgtccattccgttggctgtaatcttaattacaagtgcttttgccggatttgatataaacatcttagagatatattctgtttcatgatttttgaattttgaagtaaatatagcattttctaggtcaaggaatcgcacatattcttttggttcatcgaccttttcaaacacataactgagaattcctaaaggcatataagattcattataaaatccgagcatattcttcttcatatactcttctgcttcccaaaatttttcttcaaagattaattttcttgcctgctcaagtgtacttgaatcaatctctttttcttctctatgtcctgttcctgaccaaaatgtgtcataatttaaagtgattttttcctccggaacgcctccataaaccattgctccaagagatccatttcctagtggtagtgcttctgtaaatgattttgccggtgaaatatattttaatgttttattcatagcattaaacctttcatgtctattcttttaccgcacctgaagtaattccatttacaataaatttctgtgcgaaagtaaatatcaagatacttggaatagatatcaatacaagagctgcattatatcgtcccaaattttgcggagtcatcccataagctcccttaaatgcattcactgcaaccgttgttgtatatgccttgtctttcgtaaggaacatcaatgggaaaaggaaatcctggaaagaccacataatctgcaatacagcaaggttaatgatcgctggttttgccaatggtaaataaatactgaaaaagcaacgctggatagacgcaccatcaacatttgctgattccatcaactcagtcggaagtccatcgaagaagtttttcatcatgagtactccaaacggaattgtaatcaaacactccgaaagaataattgctaaatgtgtattatacaaatgtgcagtcttataaatatagaagaacggtataatcaaaatcggtcctgaaattgcaagacacattaaaaccagattataaatcacttttcttcccgcaaattcaattttagaaaatgcaaatcctgaaaatgaacagatcagaaccagtaatgcagatgcaaatacagcattgataatggaattcacaaagtactggtaaaatggaacaccatttacttcatttgtaagaacataccagtagttctctattccatgtacctttaaagaatcttttaacaaagaataaataggcacacaccacaaagctaacattatgataaggaagacgatcattactcttctgttcgcttttgaaattgcaaataaatcttgttcgagttcatagtctttttcttttttctttctcatatccaacacctacccattctttgatgtcatctttaactgaataaatgaaataataaatgcaacaattaatacaataatcgcagctgcacaaacgagccctatatttgatcccgctgatcgtgtagcacgataaatataggttccgataatctcagtgcttccgcctggacctccatctgtcatcaaataaacacgttccatttctctaaatccaccaagaagcatagaaagaataattgttttatgtgtatttttcaaaacagggaaaataataagtaataactggtctttcatacctgcaccatcaattgtagctgcttccaaaatgcttctgctgattgttgttaaatcagcagtataatacataatcggaatacctatcataaagatagatacggaacatacagctcccattgctaattttggatctgcaagccatctctgtgcaagtgcaccaagtccaactcctcttaaaatctgattcacaataccattcttatactcgagcattgatccaaaaactgttgccatcaatgcaatcggaagcattgacggaataaaaaacaatgcatggaaaaatctttttcctttaattttgaaattcagtatgattgatataataaatccaaaagttaaaccacaaaaaatgttagccgttgataaaataaaagtatttaaaagtgatatccaaaaacttttatctttgaatattgtttgataattcgctaagccgacaaattcggatctgcgaaatgttatcgttacatctctaaaactatttaaaattagaaaataaaaactatatcctaataatcctatgaaaataacaatcaacggaagaagaaataaaaatcccgccttgttatttcttttcgtcaccttcaattttgtttttttacttgtcatgtttatatcctcaattcctgtagaaaaagggaccatcaactgctttacttgtttttcataccagtcatgcagctgaaagtcccctttttatattagcatcagatcctcaattgtcttactgattaatattttccacttgtccattctttctgaagatctttcaatgcactctctgtagttgcagatccgttaagtacactctgtactgcagcaccttcgatatcagaatatcctgaaacgttatttctgtcagctgtagctgtattaatcaaatcaacaactgtatcccatccagccttggattcatctgtatcaaataaagaagcatctactgtaaaatcctttttagcggaagttcctgtaagctgttttccaaagatgtcagctccatctcctaatgtaaggtaagcaacaaacttagctgcagcttctttcttctctgaataatcaactacaccgattccggaatcgatataggaacgtactgtaagctgtccattgtcctctgctgtcggaagagccattgctccaacattttcaagttcgattccatttgcttctcttaatgtcttagataataatggtgcttcccaagaacccatatagtaaacaagagcatcaccatttgtaaattcctctgttgcacttgcataatccaggtcaagaacatctgctgagaagattccttcatcaaaatatttctttaatccgttgattgcctgtttatattcttcactgtcaacaggagcaccttcatatctccacttattataataatctccctgctggccaagaactgtcagcatcatctcgtctacaacccaagagtcttttccggcaaatacacttacatatttgtcaggatatttagctttaaatgcttctgccactgctttgtactctgcaaatgtctttggaacttctgctccgatatcctttaacagagctgcattataaaatcctaccatcgaaccagaatttgtaagcacaagcatctttgtatctccacttgtcagctgatttccctgctcaagacatttttctgaataagcatctttccaatctgcaccaacaacatctggcattaattcatccagatttgctagataatcctgaacttcttctgcaaatgctgatggctgaactccaataacatcaatatcttcctctgtacttaatgcaagcgggactttctcctggaaagctttgctttccattactgtcatatttatcttaatattcggattctctttttcaaacgcatcaactgtttcttgaatctgatctttacttgggaaccatgtccaataatttaatgtgatctgctcactatctgaaccactttctttcttctctcctgtagatccacatcctgcaagcataccaactgtcattgctgtagctaacgtcatagctaatactttttttgctttcatatacatcctcctgttattaaattgtttctgttttccaaaagtgaaccggttcatttttttgttaaataacaactgttaagttaataatatatttatatatttgttttgtcaatcactttttgtttattttgtcgtgttatacaattttcatttccttttttagtgcaatttgcacagttttaaccgtaaagaattcttaaaaaacgcactaataacatttatctttcttgtcataaatgcctccttcctaataaatgaaccggtttatttatttcaaatataacaaataaaactttctgcgttaattttttatattttcttattttttatgaattttcactgtttttttctatcatactcgctgatttactgcataatctttatttggaattaatcttatgcgtaacatgattattttgaccacctttgtatttttacagttcttggggaacgtttctcccgctttcgttgaccaaaatagaatttctgctaatcaagtcattgaaccgcttccaaattctcccctaaataacactttcccaatataaagtcaaaaaatctcccctcacaccgaatgaaatctaattgattccatcagatatgaggggagattctattttttataattcacttgtcagtgtacttccaaagaagcttctatgtataatctactaacaactataattaagcgttcttcttggcaattgctgcctgtgatacaattgccaattgcaggactctcgattaggctaacgtctggattctttttccgacctgcgatttttaatttcaagtctctgtccactatattcaatttccatacaaaacaatctggatatacgattatttcttttacaaatgcttctatcacctcatccggtatgctatgtgttgaaaaattaaaatccttttccaatccatactttaacacttgtaatcgttgattgtattcttcatctgaaatttcttcatctatttgatatgaatcaagtatcttctcatacttttctttttcatcagtcaatgcctttttcttttcatcgaactttgctgcatcaatttctcctgcaattctcatatcaatcagattatcaaatttcttatccagaatttcaagcttatattttgtttcttctatttctttttggaagtctatttctcgatcatctttgtaatgatcttccagcatttcatttgcaatctttataattccacttctatctttccaaaatttctgaaaaatcatatctgccatagattcaagtttccatcttggaaccattggtgaatcacaaataccttctatatcaagacctcttttttttcttgtagaaatgcttccggtttttacttgtgaatagcattgataacaatactgtggaataccatttactctgcgccatacccgtctattcattgatgccccacaatagcatttcaattttctacaataaacatcatctgccttatgcttaccttttcgtcctcgattattaacagaaaatgattttgaattaagtattgtttttacttgttcaaattcttctcttgtaacaataggtttatgtgaaccaattaccgcaatctgttcaacctctccccaatttctcactttcttctgctctaaataatctggaacatattctttcctatatacaatcattccacaataaaatggattatttaatactctgctgatataagaagaataccaacgtgttaatcctgttgatgtttttcttccagctgcttcaagttcaaattggatttttctcatccccataccgtttagatacatattatatatcatacgtactgtttgagcttgttcctcgttaatgacaaaatctcttccaactttgtcataacctaatatatttccatttccgtatataacaccgttttggaatgaaatcttctgtcctgctttcacacgaactgatgtttttttactttcattctgtgcaagtgttgccataattgtcagtcgaagttcaccatcatcatcattcatggtccaaatattatcttccgtaaaatatacttcaacaccatatttttttaatgtacgtgtttgttgtaatgtatcgacagtgtttctagcaaaacgagaaacttctcttgtgacaattaaatcgaatgcaccatttttcgcatcttccatcatttcaagaaaactctgtctcttatggacagatgttccagtgataccttcatctatctaatagccgtctttgatacaatgtaactttgccccaaaccttttaattttgccctatactttttaattttgccccatactttttaactttgcctccgaggggtgtacacggaataaaaagcgttgctaaaaatctgtttttatgctgaaaaagcacaaaataagacggcttggaaaaccaaaccgccatataagcctttattcagaactgacctcgaagcaatacccgacctccctcacgcaccggatggtaaacggcgcatccggctccgcctcgtacagcttttcccgcagatggcggatatggcatccgatggcattgctctcatccccataggaatcttctccccagaccttccggtatatctggtcgtatgtgagcacctgccccctgtttgccgcaagcaggcacaaaaggtcatactcctttgtggtaaggttgatctccctgcggtcacggtaaatctttctccgcccaggataaatctccagccctggaagcgacagcatcggctcatctttcacctgcaggcattcaatatccggatgggatttcactatctccatgattttatcaaaaatatccgaatcgtcatcttgcacttcaaataccactatacgcacaatgctgccacctcccctactttggcttcataaaatatttttgcagttttagaaaactctcatcactgatagcgtgttcaatcctgcaggcatcctgttctgcggttgtttcatttactcctgccgcaatgagctgctccgtaaaaaattgatggcgttcatagattttctcggcgatttcccgcccttcttccgtcaagtgcaggaatccgtctttatccattgtaaggaaacctccattccgcaatacacctaccgcatggctgatgcttggcttgctgaagcccatgtgccgggcgaggtctacggaacgcaccatacctattttcttttgtaaaacaaggattgcttccagataatcctcgcccgacgcatgaatcttcatactgccctcctttatgcaaggctccagccagatgacttttcacggatattcacaaaatcctgataaattccagcctttgccataagttcgtcatgtgttccctgttcactgatacgtccgtccgagatcaccagaatctgattggcttcccggatcgtattcaggcggtgtgcaatcaccagtaacgtctttccttttaccagctcactgatagcctcctgaatgtaactctcattgtccgtatcaacactggcggtcgcttcatccaatattacaatcggcgcatccttcagtatacagcgggcaatcgaaatacgctgcttttccccgccggacagggtagctccaccctcgccaaccacggtctgaaatccttccggaagtgccataataaaatcatagcaccgggctttcttcgctgcctcgtaaacctcttgttccgtagcgtccggttttcccatgctgatgttgttataaatcgtgtcctggaacagatacacgcgctggaaaaccatgctaatctgactcatcaattcagaaagcggaacattccggatatccgtgccacgaaccattaccttaccagacttcacatcccataaacgggctaacaggtttgcgatagtagatttaccgccgccggacggtcccacaagcgcagtcattgtattttttttcatagagaaattaatattatgcagcacttctttatcctgataggcaaaagccacatggtcaaagcaaacctccgggtaattaggatttgctttggatatatgttgtgtacctttatccggcaattcactttcattcaggacttcttctattctgtctaacgcagcgttcataaccgtaagccgggacgcctcgccatacaatgcttttaatggcccgaacaggtcaaagacaaagagcagcacgccaagcagataaggcaaagaaagtacgccgctttgttcaagccagacagagagtgcaaaaatggcagcaatcccaaatgcatacaggatattcagccctcttgtccatggtgtcattttccgttcaaattcggttgatgtgtctctggaacgtctgaagttttcggtcagttcttctgatttttcaccaatcaggttatagctcttaatcacgccaattccctcagcaaaggagagaaccgcatccgtcaaatgttcactttgattctgcctcccggcggcttccttcagagaaaccttattcattccctttgcaacaagtgatgcaagcagcgtcacgattgcggcgatcaggccaagccgccagtccagaaagaacataaataccagcaggataaaggcagagagcatatagctcatcatattgccaagggtactcatggcggcttcttcaatgaacaccatatcggtgctgagtacagagctgattttcccgatattgccggatgtaaaatatcccatcggcagtttacggagatgccctccaagttccattctcttatccgtaaaaatcatatatcctgcagcactttgcagcctgtcacatagatagtggacaatcgcctgcactactacaacggcggcaagcccaagtccgatatacaggcaatcctctcctgttaaagttttctgatagaaccctgagagtacaagaaacgccaaaaatataggcatttttgcaagtatggattctataaaggcacataaaaacgctccctgaatccggcccttatatttgccggagagatttaatattcttgaaagcaatgcaaacatttacttcccctcctttgcggtatttactttccattctgcgctgccctgcgccgccttccataatttctggtattccccgcaggtctgcagcagttcccggtgagtgccggctgcggccagttttccgtgtgctatgacacaaatctggtcggcgttcatgatggcaggaagtttatgggcaatcacaaacagggttttctcatttaccagttctgcaattgcagcctccattttttcctcgttctccggatcggcatatgcggtcgcttcatcaagtacaatgatgggggcatttttcaggattgcacgggccaaggatatgcgctggcgctggccaccggaaagcatcttgccagcatcgccggccatggagcggattccctgcggcagtttttcaagaaattccagacattgcgctttcttcgccgcttcaaagacttcttcatctgtagcgtccggttttcccatccgtatattttcgagcagagaggtattaaacagatactggtcctgtgctacatatgaaatctgactgtttaatgcctccaggctcatttccgttaatttctgcccgccaatagaaatgcttccctgctgcgggtcataatagtgaatcagcagctttgccagcgtgctttttccagaacccgattcaccgaccagtgccgttttctgtcctgcttttacagtaaagctgacatctgtgattacttcatccattgtcgccaccggctttccatccggccccggctgggttttctcgtatccaaaggtgatatggtcaaaacaaatatcaaggttcttcccatggaaagcatcgtctgtctgatttaggggcgctgtttccaacacctgctccaaagcggaaatcttatagttaagctgcggcatagtcggcaggaaccctaatgactttaacagcggaataccgatactaagcgacaggcagagaatgagaatcaaatccggcagcgtggataatccggaaaggacaaaccatgcgcccaaaggcagcgtaaggataaccgtgcagggaagcagactgctgtaaaccgccatccacggccacgccgctttataccattccagtgtataatcccggtagtcggcgatatctttccgaaaacgctcataagattcggcatctttgttaaacactttcaccacttccatgccattgatgtattcaatgatggtattgttcattttctgtcccgccatatagtatggccccatttttttcatgccgacagaatacatgatcatcatggctgcaaaactgacgggtattgacgcaagggataataaagccagcttccagtcaatgaagaacatggcagcataaatagccagcggaaccataaggttggcaatcccttctggcagggaatgtgccagcagcacttccagactgtccacatcatccacaaacagcttcttaatcgtgcctgttcccttgtcctggatgaaaccaagcgggagctgctcaaatcttttttgcaaagaggtgcgcagccgaagcagcgtattataagcggctttatgggaaacattcaatccccacccataaagaacagcctgcagtaccagacaaaccaatacgacaattacccgtgaagacacatacccgctccccacagcctcacccataacgagcggtgaaatcacctgataagccagcacaaagggcaggacacccataaggacactaagcagcacaataaatgttgcactgtataagtctttcttgtgcggccccgcatactcaaatacttttttgaacatcgtgtaagcctccttaattaaaatacttttctgataatgacttcaaaaccccggaagtcagatgcctgttgtgtacaaccccctcatcatcaagctgtaagacctccgtacaagtcctgacaataaactcaaaatcatgggaaaccacaaatatgataatgcctgcctccgaaagctgttcaatcagcctgctgacgcggaccattgaatcataatccaatccgcttgtcggctcatcaaaataaatgacaggactatccttaacgatggctgcaccaatcgtaaccctctgtttctgcccgccagacagggctgccggatgctgttcccggtatgccagcagttccagcgcctctaaagtttctgtcactttttcagacggatcaccgctgacaccaagggacagttcctcttccacgctgcttccaaataactgataatcggtatcctgcatgacaagataggacagggaacgccgtttacggggagagagtttctttccgtcatagcatatttcaccgttcttttctcccagcagccctgtaaggacagataacagtgtcgtttttccggctccgttatgccccaaaatgccaatcacatccccggcatgggcttcaaagctgatattctgcaatatctccggtcctttcttataggcaaaggcaagctccttaactgcaaaataatgcccgtttccatgacggcttttcttctcctgataaacatctgcatcgcactccggccatgctgtgcgcaggccataggatatcctcgtccgttccggcaggaaacagaattcttcccttgtaaactcctgcccgatctgtccatcctgaatcaggaaaaccctgtctatcaggtcacgcagataataaaaccgatgctccactacaaagatggtataaccatcctgtttcagctttgccataatctgcgccagcctctttgtcgcttcatagtccagatttgcagatggttcatcgaatatatagacctttggctgcagcgcatacacagaaccgattgctacctgctgcttttcaccgcttgacaaagcaaaaatgctcctgttcaagtaatcagccagttccagatctgctacagcctttgcgatacgctccactgtttcctctctttgataccccatattttcacagccgaacgccagctcccgtgtcgtatccgtcataaaaaactgtgaacgcgggtcttggaacactgtccctatttttccggctaactgtgacggtttcatgtctaacagggaatccccatccatccgtatatcgcctttcatttcccccggatagaaatgtgggattaatccgttcagggagcgtatcagtgttgttttcccgcatccgctgcgccccgtcagcaggataaattctcccgtccgcactgtggcgttaatatcttttaaagtaaattcttcactctcctcatatcggaaagaaaaattttcaaatgcaatcatcttcacaccctccacaaaacaatttctccgatggaggtatggtcaagaaacaacagcgtacccaaaaagagcagccctgcaatgcacacgagatattccggcaatgaaaagcggacatctctgagggcatatctcttttcttccagttccagtccccttgtcgttcccgaagccgccagctcgtctgtcactttcaggcagcgcataagcaggggaattaaaatatactctactgtggcaaccgggcgggtaatccgtttccaaagtgtatcgctgatcccgcggatatccatcgtattgcggatcatgcggtattcaattcccagggtagggatataccggaacataacgaccaggggaatcgtaaccgactgtggcagcctcatcctttgaagagccaccataaggtcatccatgtgcgttgtccgtaaaatccaatttccaaccatcacgatggggatgaatttcaaaatcgtcaccccaaacacgctcatcataacgctcaggacaggaatgggcacatatttgagcagggtactcagaatagataccactgcgtagcttaccaccattttcgcagcccattttgccccgtttccaaggctgacaaacagtgcaaatcccagcaccaatatcaggctgactgcctccccgttcacaaaatagcttacaaatccaagtaaaatcagcagcagtcctttacagcggggatctaacaatgcggttcctctaaatggctgctccatgattttttgttttattttactttccattcttcctccaaaaaataagcggaactacgtgattgcagccccgccttctgatttgaaccagccagtctactgacaaaccttattgttttccatttgcatctatgtaagttattttgcggaaacaagccccgccttgacaaaatgttttttcaatgctttttggccaatatacccgccaagcaggccgccaattaaccctgctataataatcactactggcataaaaccggaagtaatatgaatcatgccctgaatgtattccggtgcaatgttgtttttttccattgccccgacaaaggcactctgcaggaaacgcatggggatcactatcgccccgatggaaaaaatgccgttccagatgctgtacgccactgccattgacctcatgctgatgtcgccactgcccataatcgcaaaatcacaaagcagaccgccgataatcagtgcaattggaatcgtccagaagccgccgaccagcaaaaacaagattccctgtattgccgcactgatagccaatacacctttcttcggaacctttgcaagcagaagcatcataacaactccacatggaattgcagctactgcagggtaaaaaacatttgtcacgggacctgccacgctcattatggtgctgataatcatgcaaataatccacatgagcgcagtcagaacaccgatcaggataaaatcctttgcattcaatttcttgttcatgacctaagcctcctgtttttataaaaaaatttcttgggttagcaatctctaacccaagaaacagtctaccagttattcatgactaatccaacccaaaagcagtttgattctacccaaaaacaacatttttctttatttaattgatttctgttctttgtactgtttcggtatgatgccgtatttcttcttaaaagccgccgcaaaattgctcggcttagaataccccacggcaacagatacttccgttatattcaaatcgctgtccagtagcagacctgctgctttttccagccgctgctctataatgtacgcatggatcgaattgccaaacatagcagaaaatccctttgtcagctttgtcgtgcttaaatgcaccatcccggccagttcggagcaggtaggtgcatacgcaagctgggtgtcaataatcctctttgcctcaatgatggaatccctttcacttcttgaaacataaacctgcccggtcgccagtatatttaattccaatacctcactcagatacacagaaagcagttccagaatcttgctttcaagaaaaagatagcctaatcctccgcaatactgcgtaaaatctttcagttctgcgaaaatatgttccatatacggagtaattgatactttcgatatgccgtcaagcagctttttctcatacatctctgtttcacagggttcaaaataatcccggagaatcctaagaaaatattctacgggaatcttcacgttcttaaacacaaaatcccttttccccaggtagcacaggtattccattttcccatgccctctgtatatgcaggattccccctttgaaatatggacaccctgccggtcattcgcaatattccatgataccccttcattcagacagaacatcatctggatatactcttggctgttaatgccctgcacattcatgtcagaataataattcatctcccaatccgaaaaaaccgctccctgtttggtgacaacctgtgatattctgccttttcccatatcttcgggaatatttattgttacagttttaggggaattggaaagcatctctatgtatagagtattcaaattttggtttacgctatccaaaaaatcacctccctgcattggttagtttcttctaacttgctaaatatactgggctttaagatttctgtcaagtatgcggtaaattacaacagagaaataccttcaacatctgccatcagacttatgtagaaggtatcctcttatttcctttcctaaacataaacggaatatcgcccttcttattccatcgcccaattctggctctgcgtctggagcttcaccatgcgggcatagatgccatcctttttcaaaagcgtatcagaactgccctgctccaccactgtgccttccgaaaggacgacaatctgatccgcccccgcaacggtacgcatacggtgggcaatgatcatgaccgtcttattctcgatcagccttgacagcgattcctgaatcaacgtctcattttccacgtcaaggcttgccgtcgcctcgtccagcaggatgatcggggcgttctttaagaatgccctggctatcgagatacgctggcgttccccgcctgacagcccgcagccgttctcaccaataagtgtattccacttgtccgggagtttctccgcaaactcatccacgttggcaagtctcgccgcctcaaatacctcttcatcggtcgcatcctttcgccccaggcggatattctccatgaccgtattgttaaagagcgtcacgtcctggaacacgatggaataaagggacatcagcgattccgggtctattttcgagatgtccatgccgcctaccgtaatctttcctttctggatatcccagaaccttgaagcaaggcgggaaaccgtcgtctttccgccgccggaaggcccgaccagagcagtgacctgcccctgctttgcggtaaaggacacatcttttaagaccgtttccccgctgttataggaaaatcccacatggtcaaaggcaatgtcatatcctctgtttgtcagcttctctgcgccttcctgttccgggtggcttaagatttcatccatccgcctacactggatattcatgatcataatgactgcgcttaaattatccaatgcggcgatcaatgggtcatatacgcgggaaaccagaatcataaaagcaaaaaacgtgagcagggtaatctttccatctgctaacagcactcctcccgccaacacagtcgtagcaataccgagcttcagcaccatgcgcccgcaggtatggaataccgcattggtaagctcgcctatcactgtatatttctccacatcctttatttttttatccagccctttcaagtatccatcttcagcattgttcgctttcaggtcgcgcagcgtttccagacattcctggatgccgtctgaacacgcaatggacacctccgttaccttttcctgccgaacccgcataatacccgccgatgccagtataattccgaaggagacaggcagcacccacagggaggcaagcgccatgcgccagtcaaaaacaaagagtccgactgcaatcaaaaggatggaaatgattgatcctataaattccggcacccagtgggataatccgccctctaatgtcgcgcagtccgtcataagcacggttgtcaaatcggacagatcctttttcccgaaaaaggacagaggaatcttccgcagtttttccgcaagggaaagcctgcgcacgccgctctccacataggtggcgaaaaaggtggcattgtactggatataataggtcagcataataagtccaaggacaatgacaagccctgcgatataaaaagcatttttcccctccgggatgcccccgcccagcaggtcgctgatgaggttatataacagcaccaccggaaccatcagggaaaggttatgcaggatgcaggcgaaaaacgcccccaccatatcctttgcgcccttgtcagaaagggcaaacgtgtgctttaacttttcatgcattcgaaacacctaccttccattttgcggctttgttgtactgtctccacatttcggcatacaggccgtccttatccttaagctgaccgtgtgtgcctgtatcttctatcttcccgtctttgattaccacaatcctgtctgcgccggtaacggtggaaagcctgtgtgcaatcatcagtacggtctttccctttgcaagcacagaaaacgccgcctgcacttttgcctcgttgtccgggtcggcgaaagcggttgcctcatccagtatcaggaccggcgcgtttttcagcattaccctcgcaatggagatacgctgctgctccccgcccgacagatacacgccttttgcacctaccaccgtatccacgccttgcggcaatttttcaaggatatcatcgcactgtgcgtcatggagggctttcaggatttccccgcgggaagcgtccggtttcgccatccttacgttttccaaaatagatgtcttcagaagtttggaatcctgaaagacaaaggaaaccgtatccatcagctcttcttttaggatatcctttacattgacgccgccgattttcacgctgccttctcttacatcccagaaccttgccacgatgctggcaagggtggtctttcctcctcccgacggccccacaaaagcaacgtgttcacccggtctgattgtgagagaaatattttccagcgcattcctctcagcatccttataccggaaggaaactttggaaagctccacggaattgtccttcggatgtttcggatgatttgtttccggcaacggctccatttccagaatgctgtcaatgcgggacatggcgtccgccacgatcagcttattctcgctggcatacataatctttgtcagcgtcagcgtaataattggcgtgatgatgatgtaatacatcaaattcagtaaaaacccatttgttaccccgcccgatgtcatcaccagcgccgccgcgaccagtaccgcaaaaatcccatttaccagcgtggtatagcacatcatggggaaacgcaggtctttcgtataggcgatcacccatttctcataattgtcgatggcttccttgaaccgcctgaaagagaacaccgactggccgaaggttttgaccaccgaaatgccccttacatactctaccgcttcattggacatctgccccagggcgttgttgtattcttccattttctttgccatgcgctttcccgtcatgacgctcatgatgacaaacgccgccgcaaccggcaggaggcttaaaagccccagccgccagtcaaaaacaagcagaaggacgataagccccacgggtgtcgcaagggcatttgccttgtcggggagctggtgggcaagataggtttccgttgctgcgctggattcataaacagtcttcctgactttgccgctgccgatgccgtccataaagcccatgggcagggtcacgatgtggcgcattgcctttgtccgcatatttgcctgcacccgaaacgccgccaagtgggaacatatcagagccgcaatataaatcaggattgccgccactgcaaaaactaccgccatccaaccgttatgggacaggtcctgcacctccccgtagtttggggccacatccaaaacttctttgatgactttccagatgtacacaaacgggagcaatgccaccagtgcgctcagtgcgcttaaaatccatgacgctatggtcaggtacttatagcccccggcatactccaggagccgctttaaattggattcttttttcaaagataagacctccttgtatgttttttatgataaaggaaacgctgcagtcattccctgttatccttatgaaatattggttagttttcgctaacccatgaggaaaatataatagaaagcccgcaatgcaaactttctatatattagctgtcggctcggattactgccccatgattttcatccaccctgcggtgtagaaatcatttaactgctgcaaaaacgcctttgcgtcgtcaaaaggcatcctatggagaaccatttcaaaaaaggcgcctatcatccctgttgccatgatatgctccagcctttcgtcaattttgggggaaggagtcccaagccgctctaagactttataataatgatgggtagcctccacctcgatctccaccatgtcatcgatcatggaagcgtatttcgtacccgccgaacatttcaggatcaggtaaaattcatccatatgctcacaggaatatgccagcagctcattcatacactctgatgacatctttcccatctgctctggctgcttttccatgggcaggctttcaaaatattcatgggtctgcttataccgccccatcatatattcataggccgggtccaccaatgccgcgaacagttcttccttgctgtcgtaatagccgtaaaatgccccggtggtcacgcctgccgttttgacgatatttcgcagggaggcagcctggaaacccttttccataaattccgcttttgccgccgcatgaatcagctccagtgtgtttttttccggctcactcattctgccgcacgctcctttccttgtaacagtgttatatatcaccgttatatagtatagtccagaccggagtttttgtcaagaggataaaataaatttcatctgaatgcccaaatcccgttttgattctccctgcatttttataccatttgcaaaacagaatacttcataaaaaagaaaagcccctgcccacactccaagtgcgtcagaagccttttctgtcctctaaaccttatgcttttatctccatcccgttcttaaaggtaaaccggacgtcatccctgccgtagaccgtcgcatagtccaccagtgcgtaccatgcgccctcatcgaagctgtccacggcatccggcatcccttccagcgtatccaccaggttctgcatcatctcccgctgcgcctgctttgccacgatcccgtcctccacctcgccgagccgcgcctttgccctgtcgaaccgttccgcaagggcattataacgtttttcgtattctgcctggttctgcgcgatgcgggcgttctcggcaatgcactgctgtatcagctccgccaccacgttcatctcctcctgcaggtgcttcttctccctgtccagttcgtccgtcccaaatgccgcctccttcatctcctcaaaggctgccgtgatctccgccctttccccgcagaaactgttcagcgccctgacgaacagcgtctttatggcttcctcgtcaagatggggcgtggtgcatttctccccgccgtcaaacttgtggttgcactgccagaccaccttccggtacttatcgttggaatgccataccttggagccgtaccagctcccgcagtccccgcattttatctttccggagaaaacgcctacgcagctattccggttcttccccggccgcctcgccttcatcagcgcctggacgctgtcaaagacatacggctctatgatggccggatggttcccctccacataatactgcggcacctccccctcgttgacctttttcttcttggagaggaaatccaccgtgtagaccttctggagaagggcgtcgcctttgtatttctcgttggtgaggatggactccaccaccgccttgccccacaccttcttgccgcccggagtggggatgccctcttccgtcagtatctttgcgatcttataaggcgaatgcccgtgcaggaacagcccgtagattttccgcaccgtttccgcctgcccttcgttgatgacgaggttgccgtcctctccccggtcgtagccgaggaacctgccgaacggaacgctcaccttgccgtccgcgaaccgcttcctcatgccccaggtgcagttttccgaaatgctccggctctcctcctgtgccagcgaggacatgatggtgatgagcagctcgcccttggaatcgaaagtccagatattctctttctcaaaataacattcgcagccgttctccttcagcttccggatggtggaaaggctgtcgaccgtgttccttgcgaaccttgacacgcttttggtgatgattaagtcgatgcggccggcgagggcgtcctccaccatctggttaaagccgctgcggcgccgtgtggaggttgcgctgatcccctcatccgaatacagtttgacaaactcccagtcctcccggctctgtatgtaattcgtataataatcgcactgtgcggcgtagctggtctgctggtcttccatgtcggtggaaacgcgggcgtaacctgccaccctccgcttcttccggctgctgatggggtccgccgtgaagcggttcctcgtggccggtatcgttgtcacgttctttgccatttcctcaccttccctccataaaaatggcactcaaggctcccgtcctccagcgccacaagctcctgtacctgtttttcaaattcagccccgtcaaattcctccatgcccatcaggtaagccgagattttgcggatgtccgaatcctggaaatcccgcccgctgcattccgtccggactcttgacttgccgctgcaccgccagtaggtgtatttcccgtaacagcagtatttgtggtaaagattgccgcaggaggcgcaccgtatcttcccagcaaattcctccgtggacgtgttctcgtgcctgctgccgcggagcttcagggctttatgcgtcctgactgttccgcccttcagatggaagtctatgctccccgttctctgcaccaccatccgctccagcgtttcctcaaaaaagccttcgttaaattcatcctgccccataaccttgcagaagatttcctttatctccgaatccgggtaatttacgctgtcgcaggtcacgccgtggctgctttttgcgcggcagtaccagtaaaggtgtccgccgtccgccgtctggctcaccgccctgccgaaacgccgcccgcaggtctcgcagaaaatcttcccgtcaaaaatgtttttcgggcgtttccttgccggcttgtcaggttttgggggcttcaccggctccggcgacgcctcccacacctttgtctgcccgtccaggaatgccgcctcaaggctgccgtccgcaaggacggtaagccccctgacggattccccgaaagcctctgcatcaaattcctccatccccatcaggccggcgcatatcctctggagctgttcttcggaataattgtggctccggcaggtgactcccttctctttcttcgccctgcagaaccagctcacatattcccgccctttcacagtggccgaacgcctcgtataatggcatccgcagatgccgcattttatcttccccgtgaaagggtatgcaggatttaccagcgccgcccttctgatgatctcatcctgtgccttgtcaaaaacctcgcggctgatgatcgccgtatggtcgttttccacataatactgcgggagctgcccctgattcttaattttatttttccgtatggggtcttcaataaagcatttctggtacctgcggtcgccgatataaatttcgttgcgcaggatatagttcaggtggctgtaggaaaggttatatcccctccatgattttatccccgcctcttccagttcgcttttgatctccccaagcggcacgcccgatgtgaacctctcgaatatcagccttacggcttccgcctcctccggcacgatttcatatttcccgccgtcatagctgtatccgaatacccgtttgttcttcaccccgatctcgccggactggtatcttttccggattccccatttcgaattttccgaaatgctccggctctcctcctgtgcaaacgaggcgaggatggagagcatcagctccccatcgccggaaaaggaatggatgcgctccttttcaaaccgcacctccactccgatttcctttaaatgcctgatcgtagagagcaggtctaccgtattcctggcaaaccttgatatgctcttggtcagcacgatgtccaccttccccgcctcgcagtccgcgatgaggcggaggaactcgctgcgcgccgccgtcccggtcccgctgatcccaaaatccgcatacaccccggcatattcccactcagggtttgactgtatcagcccgttatagtaactcacctgtgcggaaagggaatgggcgaggcggtccgtttccatggacacgcgggcgtaggctgcgaccttctgccgcttcttcagagccgggattttcggctctatcctgcttatcttcgccataaaatcactccttccgctactatacatcactctaaaaccgcattaagtcaacggttttccagccagtaatgtacccgaaaccgggcggtatttttccagcagttttgtatcaattatggctaatacttctttatcgatgacgcctttttccagcatggatttagcaatggaaagcgaaatatagtacagcttttccgcccggaactgctcctcagtcatctgccccgccacctccaaaccgatggttaatataacaggcatgggagcagtatttccttttggaattgccgtaggccgtgaacttcctgccgcacccggcgcaggtatgggtgtagaccgcttttttgttcagcatctccggatgtcccttccaccatttcttccggcactgcgcagagcagaacacccttgtcttcatcccctcggcctgcaccagcgccgccccgcactccttacagcggctgccggtctcctccggcgctttccccgccatgttcccggtcagaccgttccgcctgcagaacgccaccacagcatcctttgtcagcccgatttcttttgctatgctcgcatatccaaagccgctgctgcggcgctttatgaccacatttttctgttcttccgtcatgagaaccacctcctgcggaggcttatgtattttaccctgcttttaagaaagcctcccatttcattgccacggcagaggggaaaacttgagggtaaaataaaaaaaccgtcttacggcatcttatgagccgcaggcttgtcactattcgctgttctttcatgtcgttttattaaatatgctgccgcgaacctccgcaggacggaaaaagcagcctggtttcccaggctgccataaggttcattctgaattgatctcaaagcaatactcaacctcccgcacgcagcggatggtaaacggcgcatccggctctgcctcatatagcttttcccgcaggttgcggatgtgacagcctatggcgttgctttcatccccataggcatcccagccccagaccttctggtatatctggtcataggtaaggacacgccctttgtttgccacgagaaagctgaggagatcatattcctttgccataaggcgtatctcgcgccggtcacggtatatttttctgcggtcaggataaatttccagccacggaagcgaaaccatcggctcatctgccagccgcagatgttcaaaacccggatggcgttttagaatctccataacctcgtcaaatgcggaagaatcctgctccgcaaattctatcaccattacacgtccgatacaatcaccccattccggcataaaatcatttatatggctgataccttaataaaccagacgctggcagcatactctcccatgcgggcattccttttttacttaccgcccgcctatctgccggatatagctgcatatcaaatctgccgcagcctcttctcccactgatgcgtcaatacacagttcatagccgtgtgggttcccccactcctgcccggaaacacttttataataggcactcctggctgcatccgaccttgcaatgctttttttcgcagcctccgggctgtccccatacatctccatgatctttttctcacggtagcttttcggggcatagataaagatacgcaccacattctgataaccccgcagtacatagtcagccgaacgccctatgatgacgcaggagcctgcgtctgcaatatgccggatcgccttttcctgcgctgcgacagcacgcttcaccggatcggctgtgaggtacagctccctcataacggcattttcatcagaattgataccagaaataaattcctgggccaggccgctttcctgtgccgccaatgccaccagctctttataataacatgggatacccagtttttctgcagccatctgcccaatccgttttccggcggagccatgctccctggcaatcgtgatgactgccccctgacgggaaggctgtatcactgcttcggactctttcactttccctccatggcctaattctttccatacctggatcataactgctgccgtggccgcaatggccagcacatccgcaattggtgccgcccagaaaattccggtaacgcctatggcagcggggatcagcagggaaaaaacaatcagcagcacatcacgcaggacagacagcggtgcggcggcttttgccttgcctatggactgcaggaaaatagcgcagaccttctgtgcacaggtgacaaggatcagcgaaagataaatccgcaggcagagtacggcaaactcaaaatagacaggatcatctgccgacccgaacatccgtataaacacaccgggaacagcttcaaacaaaaccatgcagaccagaccaacaatgaccgtccactttatcatcagccttaacagttcccgcacgcggccatagtttttcgcaccatagttatagcctacgatcggctgtgcgcctgcggcaattccgatagcaacattgagtacaatttgaaaaagcttcataatgaccacaaacgctgccaggggaatatctgcaccgtaaacggaacggatcccgtacttcaccagcagtatattattgactactgtgatgattacgatggaaagctgggtcaagagactggaagtccccagggccattaccggctttagaagcgccatgctcggcctgaaactgccgatgcccacccggaatgtcttaggatgcctcagataagctgcgcagatcaagaagctgacaaactgcccaaggatggtagcccatgccgcacccttgatccccatgtcaagtgcaaagatggcaaccggatcaccgataatattgataacagcgccggtaagcatggccaccatggcgtattgggggctgccgtccgccctgatgatagaggcaagcgtattctgtgtcatggcaagaggcatcatcgcaaaaatgattacgccataatcgtgcgccatctgaatattggcgtccgttgcgccaatcatgcgcagcagaccgtccccacacagataggcaatagcaatcaccactacacctgaaagaaacgagccaaggactgcaccaccaacgctcctgtgtatatccttcgtctccccgcgccccaaagaaacacttaaggatgcggccgcaccatcgccaaagaacaggctcaacccccatcccactaccgtgatcgggaagataacgccggtagcggcattacccaggtaacccacaccgttgcccacaaaaatctggtctacaatgttatagagacaggaaataatgagcgaacagatgcaggggattgcaaactgccgcagcagcctccctactttttccgttccaagataattactgttttccataatagattctccttttttgcgcaaaaaaaacgacacctgcagcacccgtaccgtaatcagatttacgcgcggcgcgccacatgtgtcgttgattttgccttatttaatttccaaatcttattatattctttttgcctttcaaaatcaaagggcattttccacaaaaaaccgtttcctattatttataaaaaatgcacaaagttttgtttgcgtttcatccggcatcctgtgctatacccctgaactccgcatgaaccataaagctcatatggaacatcttcatcacccaggcaaaaaccctggtaacaatgctttttctccagccgcctttcaggtatccgtctatgtaatcccgttccatcacattcacgatatgctccgaccagccctccagttcttctttcggtttttccaatgaaaagaaggacttcgtcttattgcccgccattttcacttccgcattcacgcctttaagccccacggcatttaccgcgtcaaaagtaaccatgccgccggggaaacgcttcgccatggcacacagaaggcggcgcacctgttctttttcaaaatagtaaaacagccctcccgctgtaaaaacaatcccatcctccggacggaaatcaatccggtcaaaccatgagaaatcattgaggtcacagaccacgttccgttccagcttcccatgcgggatgtgcttttcacgcagcgttatcacattttccatatccaggcagtaccacggattcgtttcattccccatctgccgtctgaggcagctaagccccgcgcccatctccacgactgcggcgcggggatgttttttcagataatgcctgacctcccacgccatattatactggcggatcaggcagcacatccacatatactggaaccggtacagcttcttgtttgaccagtccacgcccatttcttttacaatcctgcccgcgtcatggtcgggaaacagcgacggatgtttttttgccgctatcgcccgcccccacaagggcatacacaatgtctgctgtaccgtattttccttcagttccggcatggtttcccttcctccttcaaatagcacaaaatatattcactcaccgtcacattccacctccgactttccgaaaatctcccctgcttttaaggttttaacccccagcataaaatagaggatatggaatatccacacgcaggcaaggataatcctgccgacaggaacctggtccatcatgacgaaccccatcgacatcaaaagcgtcaccgtcaccataatcttaatcttggttttccgtgtcatgcccctgccctttatatagctttccagattgtttttgtacagctttgtcccggtaaaccagttatgtaatttttctgaactccttgcaaagcaaaacgccgcaagcaggagaaacgggaatgcgggcagaagcggaaggaccgcccccaatgcacccaaagtagcgccaatgcaccctaaaaccacatacagtatttttttaagtttcatcacaaacctccaaccgctttttctcttttttcacttccagtacatggcgcacagccgtcaccggatgatggaatatcattctcggccctgaaaaacgcatgaccgcacggattttttcccgcatttcaggcttataacagtataccttacaattagaacaaaatgtcttagtctccataaacgggcatttgtcactcctctgccttgcatattcggcaagggccgcacattccgggcaaaggccgtttttcttcccgtgctgtctcctgcagtaaagcgcgatcatctccgacaccacagccttttcccgttcccgttttgtattgacgtccttgtgcatcagcttaccctccctcctgtccgtgaaaggtcttctaccgaatatacggcatccgcagcccgcatcgtggactgcctgtgggacaccagcagcgccgttttcccatcccgtccttcccgcagggatttcagtatgaccgcctcatttaagctgtcaaggttgctggtcggctcatcaaggagcaggaagggcgcatcatgcaggaatgccctcgccagccccagccgttgcctctcgccgcccgaaagcgtatccccaagctcccccacaggcgtgtcatatccctgtggcagccccatgataaaatcatggatggaggctttccggcaggcctcttctatctcagcatccgcagcatccagcttcgcaatccgcaggttgctctttatgctgtcatggaacagatgggtttcctgcgtcatgaagctttccatatccctcagatccactgtgttgattgcggcaatatccctgccggaaatctccacacttccgtttcccgcctcccagaaacgcatgaacagctttaacagcgtggatttaccgcttccgcttttcccgacaatcccgatgacctgccccttgggaatctccagggacacgccctcaaggatgctttcagccccataagaaaaactgacgttttttgcagcggcgttttcaaaagccgttttttcccagcctgccacttcctgcactgcgggcgcttcatctaaaatgtccagcacacggtttcccgccgcaaaggtattctgcagcgtgcttcccaggtttgcaagcgccacagccggtccaaaagaggaaaacagggcaatgactggaacgagtaccccggaaaaatccacttttccgctttgataaagcattgcagacacagacagcatacataaatcaaatatcaaaattgccgtattcgtgaccgccatattcctccctgcagtacgcttcatccgtttttcggtttccgaaagggcatccgtcctttcgttcatctgcatgagacgttccctgccctgtccgtactggattgtttcggaaagcccccgcaggctgtcaagcacgaacccgcttaaatccccggagccggtacggaattctgtcccgtccctgccgcttaattttgatgtaatgaggggtatgataatccccactgccagatatgccagaaacgccaggattccaagtgctgggtgaaaggaaccgataaacaggcacataatggcagtatagaaaaatgcgattgccacaggggaaatggtgtgtgcataaaaaacctccagcagctcgatatccgaggtaatgactgaaatcaggtcccctttgtccctgccctccagctttgccgggcagagtttccgcagtgcgaggaacacctgatcccggatcagtgcaagcagcttaaacgcaataaaatggttgcaggactgctccgcataacgcaggactgccctgagtaccgcaaacaggaccacactggcaaatatagccttcagccccaaaggtgcctctaagccaagcagcccaagcacggcataaccgccaaaaatcgtgatgaacgatgcacacaaatggcctgccagccccatggccaccgccagaaccatatatcctgtaagtggcttcacaaggccaatcagccttgccataaccgaaaatccacttcttcttttcatccaaccgcaccgtcctttcctctgtcccggccttctgctccggcagaatggccatccaagtataccccttgggtattcccatagttttcaaggctctgctgcgtatcccacagctttgcataaacaccccctccggccagcagttcttcatggctgccgctttccgccacattccctttgtccatcacatagatgttatctgaaaccgtcacattagcaagacggtgggaaatgaggatcaccgttttctgtccggccagtgcatggatttcccgcataatgtcgttctcgctctccacatcaatattggaggtggcttcgtcaaaaatatacaccggactgtcatgtaagagcgccctcgccagcgcaagcctctggcactgcccgcccgacaggttcgaggctttttccgtaaggggcatctcaagcccgcccccggattttaggaatcccgccaggttcacctgcttaagaacctcccaaagctcacggtcagaagcatccggtttccccatcagaagattctccctcacggtgcccttgaacaaatagctttggtggctgacataagtgatgtttctcatcagctccgtctccccgatatccttaagttccctgcctcctattttcaccgagccgccatagccgcggttcctccccatgaggattgccgccaccgtggactttccacagccgctttccccaacaatggaaacaaatccccccttcggaaactccatgttgattccgtgcaggatttcccttcctcctgcggaggaagtttcattataggaaaagcgcagcccggtacagacaataggacagtctaccggaaaatatcctgttttcccttccgcttcaggaatatccagcagatggaaaatcttatcgcttgccgccataccgttcattgcaacatgaaagaagctgccaagctgccgcatggggatgaagaaatccgccgaaagcagaatgattaaaagacaccctgaaagggtcacctttcccgcctgaaactgcgttgccgccatgatcacccctaaggccgctcccccgtaggcaatcaagtccatgattgtgatagaattaagctgcatggtcaggactttcatggttatcctgcggaatttttctgcctcgcggttcatctcctcattcttaaagccgtcagactggtaaattttcagtgtcgtaagcccctgcaggttttccaggaaggtatctcccaaagccgtgtactgtccccaatattttgacagcagctttttcgcccatgtctgcaccgccgcaatagacaccgggatcagcggcacacagaccagcaggacaacagcggacggcacgttgacaaagcatagatacacaaacagcgtcagaggcgcaagcatggcatagaaaaactgcgggagatacgccccgaaataggtctcaagctgctccacgccctccaccgccacctgcaccacctccgaggttttcacctgttcattgtaggaagcgccaagcagcaggagtttcctgtatattttttcacgcagcgttttcttgaccgattttgatgagagataccccatacggcttgaaagcgttgtgcagataaaacggatacaaagcgcgattaccgcaataaacgcagtggcgaaaatgctgcctttgtctgccgttttatcataaagggaagccagcaggcctgtcaccgccgtcatcatggcaatattcgccgcaagggaacaccactgtgccgccacgttccccgttatgtactttttgctttcgctgactgttccgatcagccttttattgatcatcataattcctttacctccaccgtcagcgttttacaggcagcgccttctccagccggactgtccctgctttctcccttgtgtcatccgactcatcatagccgtcgtagggcgcttttggatcgtggggcttctgccttttggatgcattgcacacgaggtccgtatgcgcaaacacaaaatccatatcgtcagaccaccctgtatgcccggtgatgaccatcggatacaggttccttttccgtagcagttccttcagcatggcaagcgactttatggaaagccggttgtcctccgccagcgcattcaggaaactgcggccgccatccggcccgaaccagatggtatccccggtaaaaagataggcgtcatctatcagatagaccatatgcccccatgtgtggccaggtaccatgatgcactccacttttatcccttcaatatccagcacctgcccgtcctttaacagcgccctccggttatcaatctccacatagggcagcttataccatccgccgtagaccttgcgccgcacttctttcgtaaggtagcggttctccacttccccgatgtaaagcgtggcatcccggaacaggccgtcactgtcccgctccaccgcgcctacatggtccgtatcctgatgcgtgattaaaatatgctgtatttctgacggatcgatcccgatccactccatcttctcccgcaggcgttcatagttatagcccgcatcgatcatgatggtggttccgtcctttgtataaaagaaaatatttgcgataaattcacggatgcatttcacatggctgtcaatcacgccggtgtttaacggcttgaagatctccttgccgcggaatttgagcgccataaacttttcctgaaattttgatgctgaccttgacatgatttttccttatcctttctttcattctccacgcagcgtctccattgccagcgtctttaacgcttcatagctttcagggctgacggcgtgttccatctcgcaggcatccgccgccgctgtcttttcgtccaccccaagccccgtaaggagccggcagaacgtgctgtgccgctcgtaagtgtcctcggcgatccgcttccctttttccgtcagatggacttcgtgtgtgtcatccgcaaacacatacccttcctccgccagcgatttcaacgcaacggaaaccgtggggcgggacacgccaagcccacccgcaatatccgcaccatgcacggcttttcctttggaaagcgtaaatatgactttaaggtagtcctctaccgattttttctgcttcaaatccgcaccccttcctgcctctatcacggcttcacctttgcctcggcataggtcagcttcagaccgccactaaatgttttcccacaggttatttcaaacccatttcccttcaaaaaatccagatatccctgcggcgtccatttatggaatactttaaatccggaaagctccatgatccgtatcctcatcctgccggacaggctgccagccgccgtgaaggtcggcgcaatcaggatgccgcccggttttaacacccgtctgatctccgccagggctttttccggttccggcatgatatgcagcgcattggaaattaccactgcgtcaaaggttcccggtgtgtaaggaaggtttgtggcatcctgcacggagaaatggaggcgggagctgtgcgctttcgcctttgcctgccgtatcatttcttccgaaaaatccgtcgcctccagcagcttcacgcttcccgcaagccgcactgacagaagccccgtcccgcaggcaagctccagcacagtcatctccctgtccaacttccttttcataagattcacaatctgtgcataggtcctgctgtcttttgacatcataaaatcataccgcttcgcccatctgtcccaaaagcctttgttgcctttttctttcatgaattcctcctttttcctaccagagccatgtcatcactaaagcaattgccacacctcccaaagtgaacaccgggagcagcggcagcattacttttacatggaaccatttctggtggtattccttctccatatgctccgtaccgggaaggcggaccctcctgatattcgcaaaaagaatccagtccaggaaacaggtatcaaaaacagcaagaacaatcatatatccgtaagcggcaagcagcccctggacgaacgtttccgctccggctttatgcgccatccatgtgaacagaaatagtaatacaagcaatgcggcaatcttcttgaccgccataatcttagacagcgtttttttcgctgcttccctgttctgcgaacggtaatattcttcctggatttcgggaggataatcgctgataaaggtcaggggactggcaaacagcatcccgaataccaaaataccaaataacaccgccataattatgcactcaatgatgaaaactgatatgttcattttctcttccttccatttcccttcggtagtgtcaagtctactaccccaaaatcgcttcaaccccagtaaaatcaagggtttcagcctatcggtgcctttaccccctctttctccctcttagtgaccagttattttgcttccaaattcctgtcaagcccgggctgaaagcccgttaatttcaggcttgacagggatttgcgaagcataaatataatggtctctaagaggcagaaagagggcagttttttcataaatcgtttgacactaccttcccttccgcttctttttatatccgcagtcgcagtacggaccgcccgaagccagtgtatactcccggacaaaatccgaggtcccgcccgcctcggccattgtataatccagacggcacatggcagggacaaggtcataaagttccagctcccgcatcagggtgcatatgccgcaggcagtaaatcgggcttcatagccgctgccgtccggataaggataaaaaaccatgttccacgaataggggttcctgtccgcagcccttaaccgttcggtggctttcattgaggaaatatcctttttggtgaacttggattttccgctcttacggcagaaccacttcatggccggagtcatcatggaatcggaataatatgctgtcagccgccggacatcgggacgctccggcatattcagcacgaaagcggcaagcagggcgcagcctgcgatattcattttaaaatggtctcccttttcaaattccggcagcccggcaataatctctttataccgtggctttgcttttgccgccaccgcctttgccgtgtccctgtccagttcaaactctgtgagcaggttcctttcaaaagattttccaaacaacgtccacatacccatgggcattccaatgtatttcatgcgcattcctttctccactccgcgattgtccgggtaatgcgcctgtcaatatccatgcgggtggccctgcattctttcggataggccctggccgccttaaatgccagccctacggccagcgccgagcctattggcaacaggagcctcatcatcccttccgggaaaacaaaaatgtatacgcttcatcctattttccatcgctgctgcccttcctgcaccggaatgcagccattccctccacagtcttcacttccgctttccggtacatggctttcagccgtttttccaaactgtgtgccgtttcatagggcggtgtaaagtaccccctaggtgtatatattttttcgataaaccaatcggtgcgcttattttcaccttttacataaaaacagccgcagaatatccctcccggcttcagaacacggaaaacctcatggtaagccgcttccttatcaggaaaagcatggaaaccgttcagcgacagcacaatttcaaaactgccgtcagggaagggcaggctccccacatcgccctgcctgaaacagacattcttaagcccccgcttttctgcctgacgttctgccctctccatcatatccagcgagtaatccaggcaggtaatgtctgcatccggcagagtttcatacaccggcatagtgagtatgcccgtccccaccggaacctccagcatcctgccgccaaagccctgcggtatgcctgaaagcgcaagctccagataacggtcgtttttccttttatccatgttccataccagcttacagactgcctttccgggcagcgtggagcaggtgatcatcccgtcatagaatgtcgcctccccgccgaggctcttatatgcgtttttgatctcatcatgtctgctcattttctttttttcctttactgtttttcggaaatattctgcagcaatttctgacctcatccgcccactgttgcggataacagaccagcagttcctcgtgctgcagatcatgacggcggatatcgggggctttaaaatgcttcttgtacctttccagatactgtttccccatttttacggcgtaaaaaatatggacagttgtaccgggtacggatatcccgttttttatcggcgtaaccagatcggaatagaattgattacggatactttccctcttcacaaaagccatgcgggtatttcctacgccgaacatatccagcatttttttgtaatacgcctgttcctttgcagggaaccttcctatccaccaccgcataaatcccggcagcctgctttttcggaacatacccgaaatcatcctgcttatcatccatgccttgcattttgcggaaagcccctcctcctgatccagatcggaacttcccaaaatagcatggcaaatatgtatatttcccctttgaaccagcagcccgacaaaggagccgcccattgaacagccgtaagcggcatggatttctcctccgaaattttcatttatatatttttcaattttatccgtttccgtcagcatatcgggaaagactgttttctccgtttcatcaaaaccgtcatacgacgcacacaccacatggaaatcctcctccaaaagcgggataacttcctcaaaatttgccttccaatgacaggaggttcccggcaacaggataattacaggtttatttaattctccaaattcataaaagttcatagcatcctccatggcgtttcagttttttgcctgcctgtaggaaacaaaaacctctgctccgactatcccagcgccacatccagcgccatcatgaccgtaaaccctgccgcaaacagcactgtccccacattggagtgcttcccttccgacatttccgggatcagttcctccactaccacatagaccatggccccggccgcaaagctcagaagatacggcaggagcgggaccacaaatcccgccgcaagtatggtcagcgccgcacccactggctccaccgcaccagaaagcgtaccgtaaaggaacgcctttcccttgctgacgccctccgcccgcaggggcatggagatgatcgccccttccgggaaattctgtatcgcaatcccaagggaaagcgccagcgcacctgtggcggtgatcccggcatccccggaaagccaccctgcatagaccacgcccaccgccatgccttccggcaggttgtggagcgtcaccgccaacaccaataagacctgcttctgcaggctgcttttgggtccctccgccttgctgctgttcatgtggagatgggggactgcccggtccagcatcagaaggaaaaggacgccgagccagaagccggctgcggcaggaaggaacgacagtttccccataggctccgactgttccattgccgggatcagcaggctccagacagatgccgccaccatgacgcccgccgcaaatcccgtcagcgccctctgcaccatttggttcagcctgtttttcatgaacagcacacaggcggagccgagcgttgtcccaaggaacggtatcaggatgccctgaaacacttccgtctgcatggcgtcacctcccaaaccttccgaacagccctttcttctcatacggctcactgcttaccgatacggcatcatatcccgcctttgccaccacgcttttcagttcctgctccgggatgtccgtttccgcaaggatgaccgtctgcttctttgtatgcgagctagtcactttcttcacctgaaaggcgttccttacagcctcgttgatatgcgcctcgcacataccgcaggccattccttctattcccaccgttatcttcaccataaaacgccctccttttctctcctaatcacagttagcaaaaactaactcatatctctaaaaaatgcggccgttttgtgttagtagccgctaactcaattttaagtatacctcttacaccttgcttttgtcaataggatggaaaatgatttgcagaattttcagactttgaccacagccttatcacagccctgtcacaatacgctgcttatagaaaaactgccccctcaacatcaaaattgagttgatatcccatgccttcagaagtaatatgcatcaccgaggaaaggagggattctgctatggataaggattctgtactgtatctgctgatggatatgcgggtaaacggcatactggaccgcatcctggaaaaggatgcggaataccaggaaattgcccggaagtcaggggaatatttagacaggctggaggccatggaactgccgcaggaagcacggtcactgatcgacctgcactcctgcggacagaacgcactcggcgcacggtacggcgctcttgcctatctgctcggcttttcggactgcgtggagctgatggcaaagccgctgcacttgtcagccgcaccaaagaaaacagattaaaaccgcagaacgcaaaacaagcccgcagcatcgtttcaaatgccacgggcttgtttttctgtcctccgatactcagttacactcttttcgcattatccagcgaaatccatccgtttctcttttcctgataggatttcagcaatccccacttggatgcgcctccgccgtctgcctcctccaccactgtgaaggtaccgattcccgtatatttcccggtcttgccgtagtcagtccccggacctttccggatgttcaggtcagggatggatacccgcacaaggtacggctggaacgccgccgccctagcgtacactgctctcccggtttcatcaaacacagaataccccggattttcatccgcacatttctttgcgttatccagcgacttgaacgcccctttctgcgaggaagcgtccgcccacgacttccggacgcggtaccaggcttctgcaggcttcaatgtgccgcctgccatgccgaggatgcctttcaggatggagaggattttctccccataaccggctcccgccgcccatcctttcccatccgggttttccttctgcccaagccactccacatattccgcacagcccctcgtgacatacttgaaacgcgggtcaatgcaggcgttcttcagtgcatccgtggaggcgtaggctttcaaatgctgcacctgcgcccggatgccgagctgcggcgtgtcaaaggaattccccttcataccattggaagtcacgcccatgccgcagaaattattctgggaaagcgtgaccgcagagccggaaaaggtaaaattgccggtctcaaggcaggactgtgcaaaggcaatgtcgccacggactccttctgcttttccttccgaaaggtacagcggaaccatgtcgaggacggactgcgccacggacgggttcttctttttcagatatgcctgcatctgctccgccgttgccgcggcattccccatgatcttggtgtatctgtctgtgccagaagcagtgccgcccatcgctgccttgaccgctttacggaaggaatccattgtgtaccccatcccaagctgcgtccataaatgctccgggtcgccgtggttgctggcaatgcccctcgcacatccctccctgtggctgatgatgacgccgtccgcaagcggatcaaggctgtacttttcgcagagcatggcgaacagctccaccgccgtctcataagtccttttcgccaccgcctttgccgtggccgtgtcggagcaggtaaaattgctgcccgaagtgtacttgatacacgccggttcgcacatctccaccccaatgtgggtattgttgccgctgcccttgctgccggagccgcagtgccatcccctgtggttccacggtaatgtctggtaagccgtgccgtcgttcccgtcaatgaagccgtggacgcaggcgctgtcataggacgcgctgttccaggaactgatgaatgcggacgcctttggctgcgggcagcccacggaatggagcatcagcccctttaccgtgatctttctccctgccgtatagcaggggttccttgtcagaatgctttctaccagtttcatttactcgtcccccttttctgctttgtcatggagctgtgccaggatatccttcagcttctccgggatgggcagccccaggtgtccggcgttctctaaaaggctcacgccctcattggaaatatagaaaaagatgaccgccgtccgcaaaacgctgcccgtgccgatgacctgcacatcgaggatgttggcgatccccaccagcaaaaagatcagtactttctttgcaatgcccctgaaccccacctcgctggacagcttcttatccgctgcggcacacatcactcccgtgatataatccaccacaacaaaagcgatcagcgcatacagcaggccgtcacagccgccaaggaaatagccgagccaccctccggtggcagtgaaaatgagttggatcgtgttccagaatcccttcatagtgaaaccctcctttaaaagatttttgtgtatgaaaaaagcggctgcccgctgtggacatccgccagtttccttggaaatattttgttttgctttaaagccttgttttttctccggtcagcacgtttaccaccgttgtcccttccccaaatgccgcccctgcttccgcaagagcctccccggaaagccccctgtcatctctgcggtaccgtgcaaggctctcctcattctgtgcatcccgtttctttgccgtagcctccctgtcaaaagcgtagcctgcgtattccagcttttcgcagaaatcgtccatcaggtaccgcccgttgcttttccatctgattgcgccgtccgtatcgaccgtggcctgcgtgtctgcctgcgccaccgctttcctcacttcctcctctgcgttcttcttccagaatgccccaaggctgccgcttatttccctctcaaatcttgtcattgtgtttccctccgtttttgtgttttttccctttcggtagtacacatattcgctctgaatgcacatattatcaagttattccggagcatatacttcacaaacatccggggcggaaattgtgtattttatgtctgcttcggcagccactcccacagcctcatgtcctcctgcccaagcgaccacatacacatcccccgcagtttccagcggtacgccgcctggttcgcccaatagaccagcgagtccacgtcctggtaatagaggatggagaagccgtccgcatccccaaggaacagacgggaaatccagatattgatgtccttcggtatgacttctgccgtgtagttgttcccgcaggacagttccatcaaatccgaatggaaaaaatcgtaatccatcgaaatgtcctcgctgcgggtagagctttcctccacatcagcagtcagcgtgaatacttggaattcctcatcccacgccgcactgctccggctgatccggccgaaagatttaaaactgctgtccggcatccgcacatcaaaccgctcatacggctcatacgtccatgcatccccaagcctcatcagttcgcagacggtacggttatccgagcggtacccggcatatccgccggaaaagccgctgattgttgccgtaaaccgcagcgtataggacgcaccggaataaacacgaaccctgttcccccggatgcgcatctccaccgtgtacatggttggattccctctgaggtctgcattcgccgtccggctgatggtctggctgtaactgccaagaagggtggaacccttgtaaagctccaccctctgcgtgtcataatttaagcagcagaatacatccccgcagaacacccccgccttcccgctgccatttgccgggaatgccagccttgcccgcaggtggatgtcggaaaagccgctgtacttccatgcaagctgcccgctcccctcaagctgggagtacggccggttctcataaccctcccgccacacctcccacttgccggagagcatcgtccaatagctttccggcagggggttctcatcacggaagtcctcgtaccagatgagcaccgagtccggcttcctgcggagcatctccagcgtcagcttgaagcctctgtccggctgtgccatgttgccgttaacgtccttaaatttccgcggcgcaagcgtgtaggtggcggagccggcactcggttcttcagtgaaggactggcacacacgaaaaccgtaaaactgcacccctttcacatccaccgaggccgtgatggtatgcgtccctgcggagagggatatcccctctgccagcgccgaccagaaggtgcttctccagtacggccaccacaggcggctttccgtgaaatacttcctgctcccgtcaatggaaatatatatcccgttcttatcccagaaggggaagcacagacgcacggcgatatcataagtccccgccgaagacaccgaaaaactgtaagaggcggagccgttatcccccatcgtcaccatgccctccgatacagccactatgccggaatagctgtccgggcttccgccgctacggtcaacaatgatatttccaaattccgtcttctgctccttgccgtaggcggtaaggtaatgcctgcggttgtatgtgccggaaagcagcgggtaatcataggaaactgcatcccgcccctccatgtagtcgtacacatggggaagtgcccacggcaccttgtcgtagtcgtcccaataagccacgatggggataaacggctgcggcggcttgtcatccgtgaagttgtagccgcccgtcatccatagctgcgcggcatagtaggtgttggaagtcccccggtaggtgacgcccatgttctctggcgtgtcgtgtatccgccagttccacccgtaggcaggcatccccaggaacactttatccggattcatcactttcacggcgtaattatagatgccctccagccaggaacgcggggagaccggccccggtgcgctgcccgcccacgccatgccgtagctcataatggatgccgtgtcgcagtaattgtcgaggtcgctgtagacgcaccagttctccccgccgacagagccgttaatgctgtccatccccggcaggcagatgttcatcagctttgcgggattgtaggatttcaccatattgtaaatatttcggaacatagcggttgacttcgccgctgtggagtaatcatcccctttctccaaatcgatgtccacgccgtcacaccacgggtatttctccatgatccgcacaagctccgaaaggaacatatcctgcgccccgcccgtgttctcccgcagagccttgaaaatgctgttcgtgccgtcattcgccacggtcagcagccacttgatgtgcggccacttcctgatatatgtccgcatggtggagccttccgcaatggaaacgccgctctcatagatttccccggttgccctgaccttgaaagaaaacagcccaatctggctgatgcggtcgccgtaatcccggagcgcctggtacatccttgtattgcccatgaacgtccataccatgatctgtttgcctttgagtgtgtccatcagaatgtcccgcccccttcctgcatctcctgcatcgtaaataacagccgcgccgttttcccgctttccagcgttaccttgtgtttggaatcccatgcggcgctgtactggtagaatccttcctttttctccggaaccccattcttcatgcattccctcgtactggcaagcagcgcaatgtcatcctccgccttcacagcttccgggaacaccgccctctggccacccacgccctgggcgagccgcaccgtccccgccgccatatcggatttcgggtagatgtggatgtctaacggggcagcggtcttccccatattgaaaagaaccaccgtttcttccgagcgcaccacgccgttgaaccacacgggagcctttatttccccatcctcccggaacttctgcaggcaggtttccgtatgcggggcatatcccgtaaggcccggcccttcctgcagttggaggtcagtaaaccagatacgcccggaacagtcggcaatggtgggaatcaccgtcacgctcacgatgcgcatatcctttttcttgttgaccacttccgcaagccttacaaactcagccatccagcgtccacctcagttccgagggatgccccacccaccccattgccaccggcccgccctgcaagaggatatccgtgatgtagaagtcacccgtgcagtccgtgatgcagatgcggacggtgacggatttcagcctctcggatgacaagttttccggcacaatctttgctgttgtccttgaaaaatacgccacaaaaatccctcccgtcagtataggtcgataaaccttgattccgtgctgccgtcctcatattccagcacaatctcaatgccgacctgcgaattcccgctcagtttcttaaggttctcggacgcaatctgcgctgagatggtgtagctgtcccggttggcaggatacaccgtctgcgacaggcttttagtcatgcctgccaccccttccgccttgaaggaggccgtgccgcttgccccgttttccccgtccgcctcaaatccggaggatacccaataggcaagcccgtcatcggcgcgggaatttctaaggaggttgaacggcaccaactccgcaatgtcctcgctggacaccacgctgacgccctccaatgaatcagcggcattgtcccacttgctcgtggagctgcccaggttctttagcaccgtggaaagctccagcaccgtattccacggctcctgcaggttgtattccctccgcacaatcctcgtggtgaccgaaagccccaaatccttatcctccacccggacataatccccaagctcccacgcctcatgctcgtaacccgtcaaaacggataaatccatggcgttcaacacataggagacggtcggcttgcagtaatccgcaagcctcatgcgggtaaattcaagcatctggtaagggttcgtgaatgcggagcagtcaagggaagatacacggatttctttggaataggtgaaatcctccacataaggcttcccgccgttgatgctggcaaaggtcatgccgtccgcaccgacggcataaagcctcgtgacaaggcccgtggtgtccaccgtccgctcaatgtccttcatgttcttcccgtacatgaacagcgcgccgctgtccttcccgttcaggatgagtagatgcaccagccggttcgggcagtcaaagaccaggtcgccaccgtgcaggtctgctacattccggaggatggaaagtgcgtttttctccgtggatgtccatgtgcgtttcgtggtgaccgtgaccgtcccgaccttccattccgtgccggaaagggcgtaggccattgccgcatccgccgtttccgcgtcaaaggctttctcctccttccggacggaataggcaaggttgtaaaattccgcctcggcgtacacctctgtcacggcgttgccggaagcatccttgctgtccgtgaccgtgcggatgatgtatacgtcatccacaatctggattttcttctcattgtcgatatacttccgcttggcgtcggcaaaggggatggagaaggaaagcgtatcctcgccgttcacctcccccgtcacgatgatgccgtaggcgttttccagcaccgcctcccatgccccgtttgagtccaagacaaccgggcgggcataaccgatcttctcgtaaggggacttcggaatgtcataaatctggatgtccgtcagcttcggcgtcctcgccgcgtccgctgtcgtgagcgtcacccggaaacggatgtaggcgcgggcaggggacggcatcttcccatccgcccccaccgccgcccaatcgctccagctaatgaggtcgctgctcgtggatgtttccacaaggggaatgtcagtcactcttgggacgcactcgcctgagacagatatttttccggtgccggacagcccgtattccacagcacgggtatacagaacgccgctttccgggtacgcaccattacttcccttccgcagcgtcacgccatctggaatagaaagggcatctacttcccctgcagtatcgccgccgttggcaaaaattgtggcacggaaataatccgcaaggctatccgctgtaagctgtgaatcacagtctaaaaaccagtcgtcaaatccgccggcgtaccagtaggagccggcgtgcatccccatgataaggtctgccgtgcaggagcggttcagctcccccgtaaaggacagggccgcagaagtccataccaccccgctttcccggtcacctatgacatactgcgcctttttattgtcaggctctatcacgcaggcaatgaagtaccatccgttattcgcaaaagcaaaaggtggtgttaccgactcatccagtatcagggagcctgtggagttatacagcataatcctcggctttccacggataagggagaggtagaaaatcggctgccccggcccctgcctggtattgaaaatcggtgtgtaagtattgccgatggaataggtggtggggttcatccagccgcccacaatgatccgctccccaatgtcctggaagatggcgccgtcattcgttaccttcagataggttttctccgaagcggggtttgtgatgttcatgcggaaatgccgccccttctgcccgttgcggaaaccggcgctcgtacccgaccatccggaaacaaacatcttcctgcctttcccggaggaatcggcgagcatggtatccgcatccggggcattttcattgaaacgccatagtccgtcctttgcgtattcagtggggaattcccccgtgaaatccgtctgtgtgtttaagactgcctgtaaacccataagaaatcacctccaccggctctttgcctgtatttcaagttccgtgaacgtggcgcttgatacagccacctccaccgtgttcagccccgcttcaagcgtaggaaagttcagttcgccgatatacggcagggcattgcggagcgtgttcccctccgcgtcctccacccatgccgtcattttcgctgtgtcaaccaccaatatttctgatacagataaaaccgcatttgcaatcctcagttctgctccgtttgtggcaatgctgatgtatctgcccgccccggatgccaagacacctttcagccggtagacagggttggaatataaattcccaagcctccgcctcaccgtgtggtttcccgctgtcgtaatgttaaaaacctcatcctccacagcgtagccgaaagggtccggacagaaaaaggcaaggtcgaaggtcgccgccagacgcaccacccgttcaaaggttacgccgttctgaagccttgcgtaatatacccgcccaggctccgtgtcaagtttcagttcgcacacccctttatccggactcagccagcttacaatctcatccttgcaccggagcagttccgccgctgtcagctttggcgggatgaagcaggaaatttctatcacccgttccgagagggaggcgcccaggtcaatcaggccgtcccttcccgccatcgaaatggtgcggtttttcagttccggcacccggttctccgtagccatgcggcttgcgatacccatgctctttgatgatatcccgtcaaacgaaaaacccatctgtccacccctttcctacgaatatccgtttgcccgccgcccctgctggagctgcctgtaaagctgctgtgagattttgcggatgtcctcttcgctcctcacgttcatttccttcacctcgatcagcgggccgtttatggaaccgccctgcgacacaccgtcaccgccgtttccggatacagaaatctcctgcacggctgcggaaggattcaggaccatatctgccgccactccgtccacagcctttgccaccatgctcttgctgtcctcgatgccctttgccagccccttcatgaagtccggcatccagctctcgtaatcggtcagcggcccttcgtccggcacggagaagtgcaggaaagattttattttattcgccacgctgctcacggcatcgcccacagcgccgatacagctcttaatgccgttcacaatgcccatgatcatgtccttgccccactgcagggcttttgacgggaggcttgtgatgaagctgatggcgttgttaaagccgctctttatcacagacacaatattgcccatggttccgctgatggaggacttgatgttattgaacaccgtggaaactgtattttttatgccgttgaccacagtgctgaccgtgttctttatcccgttccaaacggtagaaatcacattctttatcgcattaaccacagtcgtgaccgcggacttgatggcattccacaccgttgtgatgaccgtctttatcgcattcagcaccgttgtgactgtatttttgatggcgttccatgccgtggtgataaaggtctggattgccgtcactaccgtggtaaccacggtttttatcccgttccacacagtcgtgaataccgtctttattgcattcagcactgttgtgatgatggtcttgtaaatattgaagtaggtggtgatgatggtctttatcacttccaccactgtgctaaagatagtctttatcccttcccacagcccggaaaagaaatccttgatcccattccacaccgcctgcgctgtggaggaaatggcctcccatgccgccgtgaagaagtttttgattgcctcccatacggcaatggcgacctctttcacattttcccagaggttgatccagaactgccggaaatcctcattcgtattccacaaatagataaacgccgccaccagcgccgtaatcgctgcgataatgagaaagatgggattcgcaagcatcgtggtgttcaaagcagcaaaagcggtcttgactgtgttaatcactcccgccaccttcggcactatggtcataatcgtgccgaccacagacaccactttcccgacgacaatcagcacgggtcccagagcagccgccagtaatgcgaccgtggtgatgactttcttcgtcccctcatccatgccgttcagccagtccacgaacttctgcacccatccgacaatcattttgatggcgggcagcagaagctccccaaaagaaatagccagcccttccaaagctgactttaaaatggtgatctgcccctgcaggttatcaagctgtgtgtccgccatctgctgtgccgcgccgccgctgtcaatgatggactgctgcaggtcatcccatgtgcttcccgtgttggcaagcagggcattcacggatgacaggtcggtcttgttgaaaatctgcccgatgatgttgctcttctcggccgccgtcatgccgtccatgctcgtgttcaaatctccgaggatgtcgttcagggagcgcatattcccctcggaatcgtaaacgtccagaccaagctgctccatgcaggcggccgccttgtcggtggggttctgcagggaaaggatgacattgcggagatgtgtgcctccctccgcgcccttgatgccgttgttggcgaggatgcccagcgccgtgttcagctccgccgtgccgcccttcacggtctttgcggtcgcgccgatggtaaggatgccctcgccaagctgcgccacggaggtattggtggtggaggcggtcttcgccatctggtcgaccatcgtccccgcctcatccacgcccatgcccagggcggacatggcgtccgtcaccatgtccgatgccgccgcaaggtcgatgccgccggctgctgcaaggtttaaaaccgtagggagcgtgtcgcacatctgctgcgtgtcgtacccggcaagggcaaggtagttcagagcctccgcacattcgcttgcggagaacgctgtctcgctgcccatcttctttgccagtgcggaaagcgtatccatcgtattgacgctctcgccgttgaccgtagacatggcatcctttgtgattcccattgtcgcctgcacctgcgacatagagctttcaaagtttgccgccgtgctgactgccgccgtccccaaagccgtaacgcctgccgtgacggggagcagtttctgaccggcagaggaaatgttatcccccacggtcttcagcttttcacccgtggcggcgattttctgcaatgccacagcggactgccctgcctgccgctccagatcacgcagattgttttcagtctcgatgatttccctctggagggcatcgtactggtcctgtgagatttccccgttggcaagggccgtgtttgcctgctctgcggcggtctttagggtctccagcttttccttcgtccctgccacagcctcgcccaaaagtctgtgcttctgcgccagtagctccgtgttgccggggtccaattttaagagtttctccacatcacggagctgcgactgcgtatcccggatggaggaattgactccctttaatgcggtctgtagcttggtggtatccccgccgatctcaacagtgatacccttgattctgttcgccacggcggacaccccttcctgttaaaatgcggaaataaacccagggggacgccgcctaaaagcggtcgaaatcctcctgggtagcgatttccttatagcctttgtattcgtcattcctgctctccgcgaacatatcgttgaccatcccgatggtaagtaaatccaggtcgcggatggaaagcccaagctgtacgcaccggagcaggaacagcggcgtggtcatttcccggtcagtcgggcgaagttttttttagactggacatccgtctgcacatttaaaccccatagctgtatcagcttgggcagcacctggtaaatggagaacgtgttgaattcatccagccattcctccgggctgtccgggatattggggtctgcgtgtttcgccatcacataggcgatgttctcgaacatctccagagagaacaggtcaaggttggagctttcctcgtccccgtcaccgatggacttctccaaagaacgcaggtctttgtaaatatcccggtggaacttcatccggtaaatgcgcgggatggctgcggatgccttgaaaggcacctgcttcccgtcaatctcgatattctgtttcatgctcatacattaaccctcccctcccatatcaacagtaccgcctgtttctgtatctgcattcccacctgctgccgcatccggcaggtacacgctcttgtaccagttctggtagacctcgtctgtggtgctgtccccggttttcgccttcacatagccactcgccaaaggcgctgccgtaatggacagcgtctcggtctgtacctcgatctcctcctcgttggtctgggactcaatggtcgggcgggccgccgagcagttgtacagcacatggcggattttccgcacatcgccgtcaaactcaaacagcagggcgaagttctccgtctccgcgttggcattctctaaaagcaccttgttctcatccagcgcctccttcagcacatcggtgcggaagctctccggcaccatggcaagctccaaatccccctcatagcccatgttgttgctgaccgtgtaataggcgtacccgtcagcgtagaaattgctcggctcgccgttggggtccagggaaagggaaacggcgccgggcatcgcaacgggcgtgccaaaggacaccgccccgtccgtttccagcgtcagcagcgcgtaatgcacgttgcagatattgaatttcactttattcttcttcggcatcgtaaaccacctccatgtcaaactggtagaggacctcgtacagcttctcgctggcaatccagacctccgacttgttgtagaagatgcgccgcttatccagcgcgtcctccagtttcttctccaccgacgggtccttggtgtcggtgtacagttctatcttcacgccgctcgccttgaagtacaccatgccgtcagcggcgaaattgccgctctgaggcaggaggtagcagacaaacggcggctccggcgattcgccctccgcaaaatggtcataggcgaaggggatgccggtttccttcaaaagtgccagtaatgttttcaaagcctatccctccaatgctttctgtatctctttttcaagctgccgggtgccggcctgctccgccgccgcgatatgcggctttgcgggaacgcgcccgccgccccgcttggcgtggccgtgttccagaaggtgcgaaagctggtagcggtttttggaatgcaccgtcacttccagtgaattggatgtttcctttgtggtcttcaccgcccaggactttgcatacttcccggtgtccttgggtgcattggcttcaatatccttacgcaccgcagtcccggctttcttcaccgcctttttcacatcctccgtggcaaggtccgcatattctgtcagccccttcatgatctcctccgccatccggtcaatcgatacgccgtttgccatcgtcaccgcctcgctttcctgcatttgaatttcaaacatttctttttatagttcatgtggtcaatggcgaggatgtcgtacagttccccgccaaataccacccggaatcctgtggaatcaatcacggatgccttcctgcaccagcggacagtaaacgaaacatccgattcatccgccacagtcccggccacatccgtttcactggtcttcttccccgcctcgccgcctgccgtggcatggcaggaataataatctgtccatgtgtttttgtggttgccaatgccatccacctctacggcatttttctggaaggtgatacggacattcaaaagggaaacctccatcagaacgcctccttccggctgccggaaaggagcgcccgcagcgtcagcatcatggcgtggtggtcggcttcctcccggtgttcgtaaaggtaagctgcggcatacaggacagccgtctttgcgttttcatccttttccagcacactcctgtcatccgtgcggatgatgtccatgcagattttttcagccgactgcaaaagatgcccgatgagggaatcgtcgtcgtcataatccacacggagatagttcttcatttcttccagcgtcaccaccatgccagccgcccccttcccttaaaatttcaataactgctttttatgaaccggaggctgctttctgtgccagcaccttcactgcctccggcagcaccagcttgccgtccacacgctgtgaagcaaggaaacccacctgccccgtggccgcaaacagctcgttcaggcgcttgaagctgcgcccctgcctgtcagcaatccagtaataagaaaagtcgccaaaggcgatggtctttgcgcctgcggcgatttccggcatataagtggatgtcctgaccggccggccaaggatcatgtcgggcgcgcccgccgtaatgcccggctgccacaggtactgcccgttgccgtccttcagtttgcggatcgccttgacggtggaatcattcagcgtccacacggcgttcctgcggtacggggatctcaggctgtaataaaggtcgatcagctcatcggcagtgaccgccgttgcggatgccgcagtgatgccggtttctgcgccgcccgtggccgcaaggatgcccaggggcttccctgtgccgttccccgtaaagaacgcctcctcttccctggaaccgatacggcgggcaaactccctggtaatataggactgaaggtcaaacacgctgtcatttaacagttcctcggaaaccttgatcatagtgcccagcttgtaagcgccgatggaaacctgcccgaaggagtcatcgctttccggatatgccccctcctcatccatccacgatgccgtacccttggttgccactacgggaatcttgcggtcaccgctggaggtctggatgatctttgccatctggcggaagatgttctcctcctccagcgcctccaccagcgtgttctcaaattcatccggcacaaggtagccgccctcggtatccgtgccgatctgcagggcattggtgacattcggcaccggggccttggagcgcattgcattccagaaattcttcttgtactcatcagaagcgcgccccgtcttcccctcgccgtcatcctccagcttaccgttcatgggttttcctgtgaggggtttgttgaccgggcggttcagttccgcgtcaagcgcctcctgccgctccagccttgcaatctctttcccaaggtcggtgatctcctgctccatcctcgtgtatgcggcatcatcctctgcggaaaggacgccgttctccttcctgtgggaatccaagaatgcctttgccgcctcccatgcctttgcgcgtttctcacgcagttccagaatcgtcataatgaaatcctccttcttaatgtctcaataaattaagccgctccatgagtgcgtccacggaacggccggtttctgtttccggcgcagggatttccgcctgcgcccggatatctgctttcggtttttcccctccatatttggcggccagtttatttaaaagggcattgtttgccgccctgcgggagaacagcatggaacttggcgcggaaggaaatttcttttcatcttcctcatcttctttgggaccggcgcctccgccttcctccggctccttttccggctctgcctttgcccgtgtcatgatctcatccgcaaagccaagctccaccgctttgttggcatccatccacgtttccgcatccatgaggtgcgacagcttcggccgggaaagccccgtcttcagcacataggcgttgatgatcgactccttcacctcagagagcatatcgatggctttctgcatctgggcatggtcgccccaggcaatggtggcgggattgtggatcataagcatggaaaccggggataccaggacggtgtcgcccgccatggcaatcacactggcggcgcttgctgcgatgccgtcaatcttcactgttacttttcctttgtagttggtgagcatgttataaatctgtgccgccgccacgcagtcgccgcccggcgagttgatccacacagtgatgtccccgttcccggcattcagctcatccttgaaaagctgcggcgtgacgtcatcgtcaaaccagctttcctcggcgatggtgccgttcagttccagcacccgctctgtcgctcccggctcctggttcttcgccttcctccagttccagaacttcttcgttttcatcggattcctcctttccgttctgtgcggacgcatcctttgcaaaaatgcctgcatccgcaagttttgtcatgttcccattgataaggtacagatcgccgccaagctcctccgggatgcggtcaaggttttccagttcccggatgtcattggccgacatccacccgttctgccgccctacggcgtacccgttcatgcggctctggtagtcgccccggagcagtccgtccacgttgaacttcacaaaatactgcttcttttcctccggtgtcagcagagaccgcgccatggactgctcccaccgggacacccatgggtcgagggtgtatttcacaaactcaaggctctgctgctcgatgttggagaagctgctcttttccaggtcgcccaccatgtgcggaggcacacggaaaatcctcgctatctcattgatctggaacttcctcgtttccaggaactgcgcctgttccggggaaatggagatgggcgtatatttcatgccctcctccaaaacggccaccttgttggcgttgtggcttcctccgaaggtggactgccagctctcccttacccttgatgggtcttttaaagtccccggatgctccagcacgccgctcggctgtgcgccgttggcaaagaacttcgccccgtattcctcgcaggcaatcgccatgccgatggcgttctttgccatggcaatgggggaatagcccaccagcccgtcaaagccgagtccggggatatgcagcacatccgaaggggacagatttacggtgctgcctttcatggtcggcgcatcatcgttccccgtcaggtaggaataatagagctgccccttttcattccggtcaaccgtcatcctgtccggcatcagcgggtacagtgcaatgacctcccctttgccgttgcggatgatctgcgagtaggcattcccccaaaggagcaggtgtgtcatcagcgtttcccggaacacgaaggaagtcatctcagggttcggctcatcatggagcagaaaatacagcgggtggtctgccgccttctccttcccgccgttatccgtatatttataaaaatgcagcggcagccccgccaccgcctcggacagaatccggacgcaggagtacaccgccgtcatctgcatggaggaacgctcatttacccttttcccgcttgtgctgccacccatgaaaaagctgtaggcgctgcccgatgtgcggttcgtaggcgcatccctcgccctaaacaacccgctgaataatcccataggaaccacgctcctttccgaaaaacggacaggcaaaaggcaccgccgaagcgatgccccctgcctgcccgcagtatgtgtttttattttccttccttgaactgttttactagcctgtcaaggtttatcccgtcccggaaccctgcccggtagtaatattcattttcccgtgtggcttccgaatttgctgcatcctcgcacagctccatcatttccctctgctccgcgcttaactgctgaaacagcagctcatgtgcccggcctgctttttccgcttccgccgcctgttcctccgtagggggatattcctttttaaaggcatcatggtgcatccccatccgttccgaaatgataagctcaaggaaacccttatcgtccatccttccacctccttcgccagacagcataaaggaatctgcggaaaatagccatataaggaaccgacaaagataatgtgtacagactggtgaagaatcaaaaaaccagcaatccacgggagtcatagacactctccgatacctggttcccgcagcgcaccgcacggtcaagccccatgatggcggcgactgccccgtcaatcttctccgtggatttttccttgtcagctttaatgttgcctgcggggtcggttcgtatgaagatattgtccatcatccaccggaggactggatgaccgccatgggcaatgttctgctccagcaccagcttcatcagctccttggtaggcggggacatatccttgaagccctgcccgaacgggaccaccgtgaagcccatcccctcaaggttctgtaccatctgcactgcaccccaccggtcaaaggcaatctcccggatgttgaaccgctcgccgagccgctcaatgtatttttcgataaagccgtaatgcaccacgttcccctccgtggtcatcagcttcccctgccgctcccacacatcatatgggacatggtcgcgccggacacgcaactccaatgtttcctccggcacccagaagtacggcaggatgcagtatttatcctcctcatccagcggcgggaacaccagtacgaacgccgtgatgtccgtggtagaggacaagtccagcccgccgtagcagacgcgcccctccagcccatcctctgaaaccgggaaagcgcaggcatcccatttatccatgggcatccaccgcaccgcctgtttcacccactggttcaggcggagctgccggaaggaattctcctcgccggggttctgctttgccgattcacaggcggctttcaccttatcaatcccaaccgtgatgttcagcgagggattggctttcttccacaccttcgggtccgtccagtcgtccgcctcatccgcgccataaatcacagggtagaatgtcgggtcaatcttccgcccttccagaatatcctttgccttctgatgtgtttcatagcagatggaatgggtgtccgtccccgctgtggtgatgaggaaatacagcggctgcatcctggcgtccccggaacccttggtcatgacatcgaacagcttccggttcggctgcgtgtgcagctcgtcgaacaccacgccgtggatgttgaagccgtgcttggaatacgcctccgcagaaagcacctggtagaatgaattggtcggcgtgtatatgatccgcttctgcgatgccagtatcttcacccgcttggaaagcgccggacacatccgcaccatatctgcagccacatcaaagacgatggttgcctgctggcggtcagcggcgcagccatatacctcggcgcgttcctccccatcaccgcaggtcaaaagcagcgccacggccgccgccagctccgacttcccctgcttcttcgggatttccacataggccgtgttgaactggcggtagccgttgggctttaatgtgccgaaaatatcccggatgatctgctcctgccagtcgatcagttcaaaaggcttccccgcccatgtccctttggtgtggcagaggctttcaatgaacatcacggcaaaatcggcggcatccttatcatagcggctgtcctttgccttgaactttgtcggcttatactttttcagtttccgcattgccatcggcatcacctccagaagatggcaatcgagtaggggagattaaatctcccctctcacaccaccgtacatgccgttcggcatacggcggttcaacataacttcaaagcatgacgttccatgtaataatcgtagcaactcacaagccctgcctgtttcagcttttcttttgagattgccctgactacacaggttttcgttactatccattgatagtggtctcccatgtatgatgtctgtcttgcaaggtcttttcctatacccagcttctgcaatccccactgccgtttcttcggtactttccattgtttccagattattactcgcagtcttgtacgcaaatgtgcgtctatgtcggtcattgctgttttcatcctacctattgcaaagtaatttatccaacctcggattaccctgttgagctgttttaccctttccgcaaacgccattgattttcttctttctgtcagcttctttaacgtcctcttaaatttctgcacagaatccttgtgtggtctgcacttccattctttcgtcttggaatctttccagaatccaaagccgagatatttgaggttcattggtcttgttatgtgtgttttatctgcatttactttcagaccaagcttcctctctatccagtccgttatcgaatacataacacgtttggcacttgctttgcttctgactgctattacacagtcgtcagcgtacctcacgaagcgcaatccacgtctttccaactctttatccagttcattcagcatgatattagacaatagcggcgacagattgccaccctgcggcgttccctgttctgttttctcatacctgccctgcaccatgactcctgctttcagatatttccgtatcagcgattccgtatctccgtcatttatgatgttgtggacaaggctcatcaacttatcctgcggtacgttatcgaagaatttctctaggtctatgtccactatccactcatatccctcattgaggaacatgagcatatctttgatagccatttcacagctcctgtttggacggaatccgtaactgtggtctgaaaacagcggctcgcacatagggctgattatctgtgctataccctgctggattaccctgtccatgactgtcggtattccaagttttcttttgcttccgttaggcttcgggatttctacacgcctcacgggttgaggtttgtaactccttcctctgatttgctccctgatactgttccagttcttacggataaatccatcaagttcttccagttccatgccgtcaacgccgcctgcacccttattggcacagactttcttatatgcttcgttcatgttctttttctccagtatcttttccaacaattccgacatactttgtgtgcttcgctcctttccgctccctgtgatttgtcctatgtttatgcgtttacagctcatatacgtttcgcctacatccgcttgtcgaatactcacaggtacatacattcgtctgcacggttacattgttcagcccttcagatttctcctactatggcttctgctgacttctcacagttcgttgttactacggctgatgaaaccgcctgtgagacctcacgggataagtccgtgttctttcctcgtctaccctcccgatttacgcacatgggttacggctacctttagggcttcgttgctttaagtcaacttacccaccatgtacgccttaatatcgggtttctgtccgtagggctacgatttcgctatcccttcttctcgcccacacctcacgatgcaaaccttgggagtcgcttacaagttcgtcggtagctacgcctatgtggacttgcaccacagaacacggacatgcccgtcatactcaaaaatggcctgccagcggcaagccataatctatcagtacaagacacagagccttgcggctccgctcttggaatttccagtttcaaactccttagttgtaatctttcaggaggattgccagcgcaatatccgtatccccatctgcaggcgcaatatccagccccctgtcatagttataaacaatctcaccatcccgcttcagcatcgccttggaaatccgtccgccgtcaatgccgtactcctcactcggttcatcgtaatatttcacccagtaatggaaaatgctgctgttaaccttaatgcttccttctctccgcatatccgttcccctccttatttcagcaggttggcggtcgcaaccctgatctcatgctgctttccccaaatgtggttcagtatcatgtagtttgatgcatccagccggttcttcgcccagaccgaaacggtcttcatggtctttgtccccttcggtgtgtagtcgatctcgtaaagtgtggctccttcaaatttcctgttcagcattctgttttcctccgttttctaagcctgcggctttgttattcctttcggtagtacacatattcgctctttctgccgataatagcaagctgtttcggagcataaactacacaaatatctgcgtcaggaattgtgtatatctgacacggacaaaagagccttccggctcctttggcttggcggtgtctattttaccctgaaaaggtatccgtgttttttctcgtgtttccctgcaaaatggttcatgctcccgtttatttcgaccagcccggccagttcgcagccgttctgcgtaaaaagccatgcggtctccactgcgctactccatccggaggaaaaggtaaactcgctgatcccgttctccctcatgcaggagatgaggctttccacatccttctcccagaccacctcgctgatgtcaaggcgggcgtttccgttctccctggcggtttcgtattccctccagattcggcaggcagccgccccaagcccctctatgccctccatcaggacatggtattcagccctggccttttccttccccgcctcgtccgttgctgcgtcataggctttcttaagttcctgcatctgtgcgtatgccgtttcaaaaatgttctttttcatggtgcgtacctccgttttgtgtttttgctttccctttcggcagtacacatattcgctctaaaagcacatattatcaagttaattcgggccatgatctgcacaaatatccacagcgggaattgtgtagttttaatggttggggatgtgcttcccgtcctctatccagtcaaccagcacgatgatctccccatcggtttccatccgttcaagctccgccacatcgtccatgtcccaactgaccgggtacaccccgcagaattccacaatgcagtcgatcccgccggtctcaatccagtcccggttcaggttccatgcgccgcagaccgtatccacatggccgtggctgacatggttcttatcaaggatgccctcgatttttttgatggtttcatccttgtaaaggtcggtgtctttcgggaccgtgatgtaaaacatacactttgttgcagcctcgccccgttcccttcttgcatcaatccactcctggatgacctctgtcctttttttcataactttacgctcctttgcctttgtaattttcatcccctgccgtagcacctgtggatggcttccagaatctgttcctgctccttcccgtccacaccgatgctctccagtgcctccctggtgccgcagtccgggcagagcggcgttctgccgtccgcccgcgaaactgccggcctcccgtggtaggtctgcccgcaccttgggcagaccgaaatcctcgcaatattatctgtttctttcatcgctgtttcctcctgcgtccttattttcctgccgtggggcaagcgcctcccccttgctgcggaacatcctccccgcggatgcgcggtaacggctgcccctgctgttctggagtcggaaatatttcccatcgaaccccagcacagtgtagttgcccgtgtagccgttcttccggttggtcaccatgaagcaggcatccccggtcttccacccgcccggaaattcctccctgctgtcggcatacgcctgttccagaaatgcctcatcaaaaccgaagctctggtatccctgcctgcaggtctccatataaaactcgctcggaatcccaagcgggcggtcctcatgcatgatgtagacgaaaaccttccgcagccgcacctttccggtcttaatccctttaaggggcagctccatctcctttttgtaataaaaggacgggaagccctcgtagcggtccagtgccgcctcatcctcctctgtcaccgcccaggccgccacgggtacgcttgcgccctcctgcggctcgatggtgaggtaggagccggtcctgcttcccttgaacagcagccggtagccctcaatcaccgaagtgccgataatcctcgccccagggcagcgcatccgcatctgccggatgtttaaatttgagccgtaagcaatgtagtatctcttttccattttgaaatccatcctttccgaagggggcacccttctaccaccttaagaccgccgtagcggtccgctgccctttccgtggcaggcaaggtggcaggaggctacctcccgcgttcccttcaagcagcccttccgttgcggaaggatgcatcccctgcaagcctccttgtgaggatgtcccttgcggtcttgaattcgtccccgatgaagccgagccggaggagccaggtcctcatggcgtatttcgggttctcgctctgctgcggcttcgggcttgcgctcttgacttccttcgccatctggctgagtgcaaggcagagctggatgtagctctttagctgccctgcgtggaggccgcccctgcgcccgttacccggctcgtcgaactggaagagcctaaattcgaccgtgcctttggtgaaggttgcgtggtagttgagcatatggtaccggctgtcgttgtaatgctggcttctgccgtaatttgcgccgtggctcgtgtaccagatgtccgcaagggccgccatcgtggaaggcttcttccggttgacctgctccaaaaaccgtgggtctaccgtgcggcagtagcggttcatcctgcccctgtcaaggtttaaggcgtccgcaatcaggctttcgtggcttgccatgatgttggcaaggtttctcaggctctgcggcgtgtggccttttgccccgatgtggatgtggaccccgcaaccccttcccgcgtcgctcttcgctccggcgtgccgcagctgccggatgagctcctgcagggtttcgatgtccgcgtaggtaaggatcggcgtcaccagctcgcacttttcgctgtccggccctgtgatgctcacatctttttggaatttccactccctgccctgcgcgtcccatgcgctccaggtgtagtagccgttccgccttgccgtatcctcgtagcgccctgttctgaagaagtccgctgcaatcttcgccgccctgctccttgcgatgctgttcatctccacctcaaccccgatggtctgctttttcatttcctcaacctgccttgctaatttttcgttcatgctgttttcctccgttttctttgtgtgttttccctttcggtagtacacatattcgctctaaaaggggataatagcaagtcaattcgaggcatatattacacaatgatttgcggcggaatttgtgtattttatggcaggttatccggcatggcgcagccgggtttactgcatccagccaagttccgcaagctgcgccgtgattgccttgaaaagctccatgtcaacgcttggcgtatctatcccgctttcaaagctcaccctgaaattttctaactggctgcagaaatccaccacctttttgccatccccgccgtcaatctctttttcataaatgatgtagtcgtcatcctccctcacctgcgtgtatccaagtttctcaaaagcctgttttgcattcattcctgtatcccttcctttccgttccttgcggtaccttccgtattttatcctcgccgtaaattgcatggaggctgctgccgttgtcccatgcgaccatgacgcttgcggtgtcatccactcccgtcacggttccctttgtcccgataggcggggcctgcacatcgtccatccgcacaagctccacccgtgtccctgcagggtactccctgcggacgcgctccacaatctccctactcggaaatcccatctgctgcacctcccatccctgcgttgacctgctgtatcagtacctcatcaagcagttcctccgtcagttccggatgctctccggcatccacccgcatggcaggattgactggctccggccggagtgtttcactttttggctcgccgttcttgaaagccgagctgccggagaggttcttcagcaggattttccgttcccccttgtattccgccccgatgaagccgagccggagcaggaagcaccggaatgcgtacttttcgttatccgcaggcttttcctttgccgtgatgcgcttctggttcctcgccatgtcgcagagggcagtaatgaaatgggtgtaggctttcaccgactcgctgtcctgtccctccgcgaaccatgggaaggaaactttctccccgtccgtctcaatcgggaggctgtcaaccgccagcgcctttttaatcaggcttccttttgcgtccaccagcctccgcaggttctccagcgcggcatccgtgaaggattccctcggcattgccaccgtaagccccagatccgccccctgcggcgcagtttccggctcctctgcatggttttccggctctgcggtttcttcctccgtgccggcttcctgcgccgtttcttcggtttcctccgcagtgaagcctgcggccgccaatgcttcctttaccttttctattgtcctgctgtctgtgcgttcatcccatgccagtgtcccatccctgcttacggtaatgttgctgatagcgtaggcgcaggtcggcatcctcatataaaccgccctcattccaacaaccccggaaatgacctccaccatttccttccgcttttctcctgttacgttgtaccttgtttccattgtgtttccctccttcgtttttcggtactacattaatcactctaaaccgcaggaatagcaagcagtatgtgagaaaaaatgtcacaataaaaagtccgggaactgtgcgtaatacacaatgcccgaaagcacaaaataaacattcggcagcgcgacgccgttgccccacatcttatattcagcggaatccgaatgtgggtctttcagccatttgatgatctgcttatcggtctttggtttggtggaagtccccgcaatcctcctgtgggcctcaaagacctcccgccagaacgccaggtcatcttccgtgggttcctccgtcccaagaccgctgcaccaccagtccgggaagccctgcagccttgcacactccgttggcgtcagcctgcggacgatatactccggctccataatatggtagtccccgctgaacgcctcctggttgccgagccactgcttggagcccatgcttgcggaaagtgtgccgaacacctccttgccggatgccgtctgtacatcattgatgacaggcgggtctttataatctgtagccaccagcgtatttgccagctccttttccgcccgcgtgaaatgggaattcttgcttgtgcagtaagtcgggtacgccaccgcatggtggtccgtggcattcagcgtgaaggaaacatcctcattcaccccgctgccctgcggcccgttcttatcgtccctgccgatcatggagccctgcaccgacaccacggcaatgcctccctggttgcaggagggattcccgccgttcccgtccaatgtccgggaagtgtccgcctcatagaatccgctgtgcgggttatctgacttcatggcattgctgtctttggagcagatgccgtatgcctgcaccaccagctcattgcagcggctctcacccacatcaaaggtgttcagcgtgtttgccaccttcccgtccttccaggtcggcgcatcccctttgtagtgggcgcggcaccccttgcagaaaggcacgaacaccgtctggtcattgttgcaggagagagttgcggatttgtcatcctgtatgatcgcccctttgccgccgccctcacagccggagcggattttcagcgtctttggcgtttccaccacgaacggctggttattgccgcccatgccgtaggtggagctgaccgtaggcgccgtatccaaaggccccgtgtatctcgtatcctgcgaatggttctcatagagcgccaccgcagccgggaccgtccctgcacggagcgtgggcgaggtttcctcctcatacccgatcccacgcgcctttgcggaatgctccgtgcagaaaccggccgattccaatacgcacgggggatggtgcgcctctgcccgcagggtgcaggtcacgtcatccgtcacatccatccgctgcccgccctggtcgtttaagcagatgccgcctgccgctccagtgcaatccgcagcacctccggcagctccttgccacgcacggaagccctccgcagaatacccagacacgccttcggactcaaataatacctttccggcactcccgcctgcaaaatctgcgacaaggtagattcgtttcctacgttgggggattccccaaaattgtgcgtcaaggacgcgccatgcgagggaaaagccgtctgccacgatgcttccggcattcgcccacttcccctttggaggtccaggaacaggaatatccccgcctttgacggagcagaccgcttcgaggactgctttgaaatcctcccctttgttggaggagaaagcgccggggacgttctcccacacgataaaccttggatattttccatctgttgcacacctcatttcctttacgattcgtattgcctggtagaacaggcaggactgctgcccgccaagccccgcccgcttgccggccaccgacatatccgtgcagggcgagccaaacgtgatgatgtccaccgggtcaatccctgtgccatccaccgcagaaatatctcccaggtgcttcacaaacggcagccgcttcgtggtcacacggatggggaacggctcaatctccgatgcccacagaggggtgatgcccgcaagcagcccgcccaaagggaaacccccggagccgtcaaaaaggctgccgagggtcaggcgggaatccgcagactgcggatttggtgtgtctccgccgcaagagccaggctccctgctatgggtatacatagcgtctgcattcattccgtctccacctccttcaccagtgcagagtatgggattttctcttcaccgcgcaccacatacacattctccgaatccccggtatcctccacatacctccgcaggatgacggatgcatacttttcatccagctccatcatgtggcagatgcggttcgtctgctcacacgccatcagcgtggagccgctccctccgaaagtgtccaggacgatggcgttctcctgggaggaattgctgattgggtagccgagcaggtcgagcggcttggaggttggatggttcttattccgcttgggcttgtcatagttccagatggtggtctgcttccggtcggaataccacgggtgcttgccgttcttcagaaagccgtacagcacaggctcatgctgccactggtagtccgagcgcccaagcaccagcgaattcttcacccatatgcacaccccggcaaggtggaaccctgcatccacgaaagccttacggaaattcagcccctccgtgtccgcatggaacacataagccgcgccgccgctttccagatgctccaccatgcacaagaacgaattgtacagaaatgtgtagaattcatcccccttcatgctgtcgttctggatggtcagcccgccggaactcttaaaggagactccatagggcgggtccgtcacgatgaggtttgccttcttcccgtccatgagcgccgccacatcctccgcactggtggcatccccgcacatcagcctgtgcctgcccaccgtccagatgtcgccccgctccacgaacgccgctttctccaacgctgcggaaaggtcgaaatcatcatctttcacatctttttcaccgtccccggcaaagaggtctgcaatctcatcctcaccgaagcccgtaagggatacatcaaaatccgcgccctgcagactttcaatctcaatacggagcagttcctcatcccacccggcatccagggccatgcggttgtccgcaaggatgtaggcttttttctgcgcctccgacagatagtccacaaacacacacgggacttccgtgatcccttcctccttcgccgccgcaatcctgccatgccccgcgatgacattgaaatcccggtcgatgatgaccgggttgataaagccgaactcccgcagggatgagcggagcttcacaagctgctccggcgagtgcgtccgcgcgttattcacatacggcaccagcttccccaaagggatgagctgcatctcggttgtcgtttttcccatttttatctacactcctttccttgcgcggagcagccgctccatcacatcatcctggggcgtgttgccctggaattccaccgagcagttctccttcacgatctggtatatctgcatccagcagtaattggtctgtttcatgtaggactggctcatggaaacgtaaggggaagcgatggcggcccccgtggtcgggtgcttcgcaaggaagcccgtggaggacacgatctcctcacactgaatccaccgggagacgctcatggcgtactgctccaccatctgcacggtgaccagcttttcacatcccctcgctttcagccagacataggtttcctggtacacttcctccgccaccagctcccgcccgctcttctgcggggatttcaggaagtctttcacgggcggcacatccacgccctccagctcggcaggctccatcatgaccgcggccgttttcccctcgctgatcttttccgtgagcgccttgggcttgcgcccagcccccggccttgcaccgccccggttgctgccgtcttttgccactgtttccaccccgtttctttgattttgtttgaaaaaaatgctgcggaaatcaaacgccgcagcacctaaaaagcctatggaatgcggaaaatcagagcggggcaatcccccgtttgatttccggtttttgtgcgtgacaccccacgcccgttccacagaaaatatgctgtagagattccgaccgcccctccgggtcagcagaaacctccacagcataaatcaacacagcactgattcccataaaataaattaatgcttatgccacctgtcaccgcgctccgcatgaatccttgcatggcacggctggcacagcgacacaaggtttccctcgtcatgcgtgccgccctctgccagcggcagcttgtggtgtacctcctcaacaggatgcagcacgcccttcttgtagcactcctcacagaacgggtgctttgcggcgtagcggtcacggattctcttccaggcacgcccatacctacggcgtacagccgggtcacggtcgtacttctcgtagcggcggttctcctgtttctcatgctcctcacagaacctcccgtccgtcagctccgggcatccggggaaggaacacggcctcttcggtttccttggcatctgcctcacctccttcgggcataaagaaagcccccgcagggctgttcccacgaaggccggctgtttttatgcagttttcgatgataacagtgtaccacgtccaatatggaaaatcgtccgcgattttggacatcagcttttcccatacagcagcgtgaccagtttctgaagggctcggttctttttcttgtatgcggatgtccgctcgatgtggaaacggtcgcagatgtcgtaaacggaatccgtctgcctctcctcatcggaataaaaggtttccagcacatagcgctcatccccggaaagctcatcccatgccggaaggaaccatgccatatattctgccgcctgacggtaacgctctttcagcacatcaatctcctcgatgccctttatcatcctgtcctccacagcatggggattgtgcgtgcggggcattccgtcagactgcgggctgctgacgccgcccatcttctcatatgccgcctttatctcatcatccgtgtgttcgatgataaatttcatattgctgtaatccttcagcgcatccacggccgccgaccgtttgtcaaggtacttccagataatgctcataagccatgcctccaatcaaaatatatttgcttcccccggattttcaaagattgtcattgattttcattgattggctctgatttgctttttgactggaggcggctctccccgcctatatcttaaggtctgctttcaccgcatcgatcagtgcggcctgcgtggtgtccttttcggataacgccttcatgatccgctcgtctatggtgcccttggtgatgatgtgctgcaccaccacggtttccgattgctgcccctgccgccacagcctcgccaccgtctgctggtataattccagtgaccaggtaaggccgaaccacacaagggtggaaccgccagcctggaggttcaggccgtgtccggcggatgccgggtggatcagcgccaccgggatctccccagcgttccatttccggatactgctgtccgtgtccagccgggaacatgggattttcagtttgtgcagccgttccgtgatgcgttccaggtcatgccggaaccagtatgccacaagcaccggcttgccgtttgccgcctcgatgatgtcctccagtgcgtccagcttccgctcatggatggcgaccgtctccccggcatccgtgtagattgcgccgtttgccatctgcgacagtttcccggaaagggatgcggcgttggcggctgtgatatcgccgtccggcagctgcaggacgaggtctttcttcaaatccgcatagtgcgaatcctccttcccggaaagatacaccgtgtatctggaatttatcagttccggcatctgcaggtggtcggtggacttcatggaaatcgtgatgtcggatatcttgccgtatatctgtttctccgccccaggcaggggcttgtaggaaaacaccacctgcccgttctgcttatccggccggaagtaggaggtgcggtactgcccgatgaaccggccaagccgctcccccatgtccagcagccggaactccgcccacaggtccatcagtccgttgctgctcggcgtgccagtcagccccacgatgcgttttaccttcggccggactttcatcaatgccttgaaccgcttcgtctggtggttcttaaaggatgacagctcatcaatcaccaccatgtcgaaatcaaacggtatgccgctctcggaaatcagccactgtacgttttcacggttgatgaggtaaatatctgctttccgcttcagtgctgccagcctctccgccgccgttccgaccgccacgctgtacttaagcccctcaaggtggtcccacttttcaatttccgccggccaactgtaagaagctacacggatcggcgctaccacaagcaccctgtggatttcaaacctgtcaaacatcaggtcgttgactgccgtcagcgtgatgctcgttttccctaatccgcagtccaggaagatggcggacaccggatgcgcctcaatgtattctgctgtaaatttctggtattcatgtggactgtatctcatcaatcatccctccgatctgcgactcgtcatccagtacatacactttaaatcccaactgccgcaacagcctgtgccgggaaagctgcagggggcggggctttttcccaggagcctttacctccacgaacgccattttcccatccgggagaagtgccattctgtcaggcaccccatcaaaaccgggcgatgtgaactttactgccaagcccccggcggccttgactgccgccctgaatttctgctctatggtcttctctctcatgcaaatgcctccaatccctttatttttcaagcattccaggctttcgggtgacggtcggtgacacccgtacctaaaactcctctataagtgattttttactgaaaaaactgccctaaagggggtttataccaagaccatcaccgaccgtcacccttaagcctgtcagtccgcaaaatcagtgggtttcaggcgcattttcaaaatatatgccccgtcctttttcttctgttttttgaaacccgcagactccagcgcattataaaaatcagccgtgcttcttgtatactcgcccgtcctcagacaatagctgcggtattcctggtagacctccccggacttcgccgtgtaacccggcgccatttcacagcactcactcaggaaatgcccaagccagtcattgtcctcccggtatgatttgatggcttcctccacgcaggccggagaagggatgtggaagttacggctgattgccttttgcgcaccctcaatgatccacgccatgaccgccggcgctgcctccgaaacgaggaaatcggcatagttcttcacatcccccgctccctctatcctggcatggaacgggatcacgattaaacgcctccatgtcccagggtcattcgctcccacccttggcaggtggttggtataaagcacgagggtgtggctcggcgtgaaggaaaacgggtccttatactttttctccgcaaaaatctcatccgtggaacacatctgctttaccacggaagtgttcagacgcatcccttcctccagctccgcagcaataataagccgtttgcccttcgcctcggcaagttccggcttcacgttccgcttgcaccccacggtcagggtgtcggcggacatattcccgctgtaggttccaagcacacgggctatcgtgttccagaaggtggacttcccgttcctcccttccccataggcaatgaccagcgactccatgtagacacgccccaccgccgccatgcccacaatctgctgcacataatcaatcagctcctggtctttgcagaaaatagtgtttaaagaatccagccacagtttctcccccttgccgccgggagcttccgccgttatttttgtgatatagtcctccgggctgtggtcgcgcttcccatccagcccgtccgggaggtaataagtgccgtccggcgtgttcagaaggaacccgtctttatccaggtcagacacgctgatctccagcatcggctttgccgcctgcagtgcggaaaccacatacttcatgtccctgcgtttcatcacgaacgccctatatgcctgggcagacatatacgcaaggtaggcgtccatctgcccgccgctgatcttcttctccagcgacttgccgccggaggtgatggcatcctccgaaatgccggtgtccatgagcgcctgtttcgtccgggcgatctcatcctttgcgtccgcaagctggaggtctaaaaattcctctgccgcgcccactgcctgctgcttggactccacccaatactgcccgcagaaacgcaggtaatccgtggctgccgtatagcgcagctccacgccgtactccctggtcagcactttcgcctgcccgatgtccgagtaatcgcccggttttaaggactcccgcccgaactcgtcattgtacgcatccggggtgacatacccctcctgcccctgcaccttttccgcaaaacggcaggcgctctgccatatcatggcaagctccgcatcctcaagcggcggattgcacttattggcttcgtccatgaaaatctcatgtgccttttccgttgcgccgtaccgcttcaccacgcgccccgcaaaatgggacatggtggcgtttctctgcccctgcggtatttccctgccgccctgcggcttcacgatgcagtcgatagtgatctcgccctcatgccagaggatggaatccacaggatgcccgaagatgaaccgtgcagaatccagcgccttggcgtcaaaaaacaggaacttctgctgtatggctttcttcagactggcgcacgcctccccatcatggattggatcatgcgggaagtacacatggaacctcggccgtgcggacttcccctcctttagcttcatgttgttccggctcggcaccacaacgaacgccacatccttcccgattttcttatccaagtcttccggatgaatccagtcctccgggttgtcggaatgggaattgtcgcagtccatcacgtccacatcgcaggagaggaagttatccccgctcctgcggcagttcttaaattccgcacacacatggtcgaacgccaccacctccatgcaatcatcctcattgtcaatgacgcgcctgttggggtaaaggctgttcttcgcattccccctgcagttcgccgtgtaaaaagtcattttcatgccctgcttacctcctcacattgctccgtgaaatagcggatgggcatatcccgcttttccgccttctcgatttccgccgccatccccgtggatatggtgccgccgaatacccatagctgctcacattttccaagcaacaccatacccatgaacatcccaattgcccgctccgcaggctttgtatcatccagaaactgcgggaacagcaggtgcggcgcaaacgggatcgccccgttcttcaccgcaaaccggctgtaccgcctcgctttttccgtgttcttttctgtgtccccggcaaacggggagcatatatagacaagcggccggtatgcccgtttcgccgccctttcttccttcctgattcccgacaaagccgcatggctggtcgggtcgctgtatccctcactgttgtacctgctgattcccataaaacgcgcctccatcctgcctgtggttctctttccggaccgtgtccgcaggcttgtaaaacgggcagtccctcccgccaaagtcattgttttttaggcaggtgcagacgccgccgctgtttgcgaaacagtcatcatgcgccctgcacccctgcattgccgccctgctcatccctttccgcctcctgaaattagtctgatattattttccatccgtctgcggaggatttctgttttgttgaactgcgccctccagtatcggtacgcagccgactcctccgaaagctcctccatcttctgcctgtacatatcgcatagggccttgtacccgtccgccatctcccgcagttccgaaagcagttccgtccgtgcctcatccgtgcagtatgaattgatgagccttgtggccttcctcatcgccggcatcttgcaggggaagaacgcctccacaataagatccatgtatcccgtcccgtattcaatccgcagccgttccatcgcacaccccctaatctttctgataccactcacaagaatatccatctgcccgtaaaagcagcccctttgcccagggcggcgtcctgcccatctgttcacacacagcctccacggacatcctcctgtccgcctcgatgatgatctcatcgtggatgtgtccgacaatcgcacagtttttcagtgtctgcattgcatggcataagatgtcgcgggcaataccctgcacaaggttctccacaaactttgcaccatagctttccaggcgttcccatttttttgtgccgcccacacccatgtaggtgacggactcccctccgaaacggttctccccgatacgcggcttcacataggcgagccgtctgcccgatgggagcgtggtgaacatcatgccgctctggtaatcaaaacggataccgtgtgtctctgtgggcatcctctttttgatgcattccttcgcggcacggtccacatcccaccatagctgcacgatattggggttcgcctcccgccagctatccacgagcggctgcagctcatcctccgtcatccctgcttccagtgcacccatcgctttcagcgcaccgaccgatcctccatatccacaagacaaaacggcctgcttccctttctgcctcagttccgcattctcgccatgcttctccaccctgcagtggaacatccttgatgccgtttcacagtagatgtcgccgcctttcccaaacacatccagcacccatttctccccggcaagccacgcaagcaccctcgcctcgattgcggaaaagtccgccacaatgaattttctcccgccctgcggcacaaaagccgtgcggatgagctgcgagagcgtatccgggatatcctcatagagcatggcaagggcatcaaaatccccggcttccaccagtccccgtgcctgtgccagatcagggatatggttctggggcagattttgcaactgtatgatttttccgctataccggccggtcctattagctccatagaattgaaacatcccatgcgcccggctgtccgcacacaccgcattctccatcgcctggtatttcttcacggaggacttggcaagctgctgccggagcgtcagcacagtcttcaaaggctccggcgcatcctccagcattgcggccactgcctttttgtccagcgagtccgtctccaccccgttctccaaaagccactgcttcatctgctgcacggagtttgggttctccagttccgtcagttccttcatggcggcagacagctccgccttggagcgcacgtccatggcgattgcattttttaccatctccatatccacgccgatgccccggtcgttgatctcctggtcctgccggtattcctcccatacgaactccggcacggggaactttgcaagcctctgctgtatctgcatctccgcttccacgtcacggaggttgtatgccttgaaccgctcccatttctcccggtcatgccccggcaggttccgcgtccgcccgccgttcgccttggtcggcttgcaggggacgcagaaataccggatcaggtctttgccctccgacagcttctgtttctccagcccaagcaccgcacccacattttccaaagacagcgggaggccaagggtagcagaccagaccatggagcatttccatgattccggctccagccactccccaaggtaatttgataaacataccctctcgaacatggcgttgaacgcccacttggtgacggactcatcggaaagcgccgccagtatttccgcagggatttcctccccgcaggcaaagtcagccaccttcacatccccgccgtcaaccgaatagccgaacagcaaaatctcaaaattcggggaagaagcatatttataaacaccacatttggataaatccacatccgaataagtctcaatatcaatactgatacacctcaattccaccagctcctttcaccgccttaagggcggcagggaaaaggtcgccgccttctccccgccacccggcagtgtgttcccgttatgccgttaagacaggaaatcctcatcatccccggcttcatccgcaaagtcatcctccgcacgggaacgcccgcccaaaggctccccgtcacggattttctgtaaattgttcagcccgcaggcaatacccttatttccattgctgttgaaggcatagaaattgatgctcgccctgccatatacgccgctgtacacctcggaatggtctaaaatcggctggcggtccgcatccacaattcccggagccgtggagctgttggcgttgacgaaataggaatccgcataggcttcatcatccggacgctccacgtccccatcacgcagtggggtcttcagcacggaaagggcagggacactcctgccgttccctttcagcttcgcctcgccctcgcggtaagccgccttgatcgcctcctcgattttcgcaatggtcttcttatccgacttcgggataatgagcgacacggagaacttcggcgtacctccgttaattgccttcgcttcccatgcgttgcagtagctccaccgggtgtttgggccggtgatcactttcgttggattgttggctgtgtttgacatatgattttcctcctaatcttccttgaaatcttcctgcgccgtgttcatctccgggcgcttgtcgctctccggcactaacgcgggcttgccctgcggcttctccacaaggccctttaaaatttccgcaaacttcttctttccgagcagcttctccatggccgtgatgccgaggagcttcggctcatacgggtcgaagcccgccttcttcacggtatccgccacggcatcttcatccgtgtacttccggttggagcggccttccacaatcttaaatccggcatacttcacgccgcttaacgcctgctgcaatgcgaactccttcacatccgccgcccatgccgccagctcatctgctttcacgaggatcgctgcgatctcgtcatcctccagcgtggcaggcatctcgaagtcatacttcgcaagctccagattgtactccgcccgcttcctgcagaccgccttcgccttgcagaatttgcagtgttccccggcgcagaactcgccctccccggcataggccagcttcgccttttccgaaagttcgccctccgcccatttaagaaggtcaccttttgccatggcatacacgctgacattctcccggcgcggctgatagatcgccatgcggacattctcaatgtcatagatgccgtcaaacagctccaaggcacccagggcatacagcatcatctgcggatttccctctgcggagacctccacgcccttgccgtgcttgtagtcgatgatatacagcgtcccgtccgctataatgacgcagtcaccggtgccaaagccctcctccacataccgggagaagtccagccgctgctcgatcagcaccacagggtctttgcaggttttctttgcctcctcgatcagcgagagaacatattccgcatacccgcaggcgcattcctccatctcctcatcgtagaaggaaagccccgcagtggggtctttggtctccatgccaagggacagcttcagcttgtgttcgcacaggctgtgggcgtcggtgccctgctgcgcatattcgctgcccttatcctcatagttctcacagagccttgccgacggcgggcaggcaagccaccggtggctggaggatgctgacaataaagcgtgtcttcccatcacagcacctccgcttccgcaagcagggcagggtattccgccgggtcaatctccgacagcttatccgctccatgctttgcaagcagctccctcacttcctccgtgtgtccggagcgggacttctccgccagcaccgcacgaacttcctccagcgtcaggggcttctcctccggctcctgctttgccgcctttgcttccttctttgccgtattctttgcggcagccttcccggtctttcccgctttccctgtttcctccggctccttcgtggtggtcatctccgcccctgccgcatcgctgtacgccaccgcgtccgcaacggcctgcaggctgtccgcaagggagcgcaggtccccgatgacgtcaagcagtaacttcacttttcccatgtacgtttcctccttccatgacttcactgattgccagctcccggacggaatcgcccggcacgatgatggtcagccgctgcttatccccaagcaggaaacgcagcaggcgctccctcacggagatatgacggcagcttacgatcccgccggaaaccggcttctttgaaacactgattctcagattgtgcttcatgcccgtatcctccatttccggggcattttccaacgcccctgtttattagccacgggaagggtcaaaacttgagggtgacggaaaaatttttctgaaatttttctccgcggtcttcagccggtgggatacggcacccggagtgatccccatgcgggcggcatattcctgttttgggatgccgtcaatatgtacagcgataagaagctccgcctggtcgggcttcagatgcctgcggagcatggcgcacaccgcctcataatcttccctgcgttcccttgccgcctcaccggaggtgtctgcaaacaattcaatggcatcacccgcagggctgtcctcttcattcaccgggcgtgcatatcctttcctgccgtcaagccgtttcggcgctgcgtccgccagcgtgtgcctgtcatgcctgtgccacccgttgtaggtctctttgttgaggcggtcataaagttcctgcagtgtgccgcaccgttttaccttatcctttttcccttcgggcgcatccgcaaggcgcatctggtagtcctgctccagcaccgtcacatagtccccgtccgggatttccaccgtggtgtaatgcggaaccccgtttttgatgtcctcttcatacagaatcctgatcttcattgattgtcctttccgcctggtgcggaaaggcagggacacacagggagggccgtgctgccgtctgcggatgcggcccgtcagaaaaagggcgcaacagggagagggtactccgcccgtttccgacaaaatccgtataacggactcgtgcggaaacggtatgtgtatcctttgcctaattgcgcactcagacaaccgatattatttttcagccgtcaaaggccggctgctgcctttttatctttgggaatgctcccctgtgccggggcagaaacgctgattttgaaaaatagaaccataaattgggaaatttacagtaaaccgatagaaccgtgtcgaacaaaaaaataccgcaatccccttaaggactgcggtatgtacgaaaacatatattgttctggtttaggcggcatgaagcctgtccctttatgcggcatatgttccatggcgtttcctttccggggacggcagttttccattgtggcttgtcccccatgcggccggcaatgtatagattataaagcataaaactgtagaacaggcgtaggctggcagtagaaacgcagtagcaaaacgcaagttacgacacggcatgacatttcaaaaaagcggacaggacggacacccataccatccacctatagaacggcatcttaaaacaggcaaaaaaataacagcagcctgatttcctcaagccactgtcataatatttatttactttcatccacctcgaagcagtatcccacttccctcacgcagcggattgtaaaaggcgcatccggctccgcttcataaagtttctcccggagattgcggacatggcacccgatagcattgctttcatcaccaaacgcatcctcaccccatactttaccgtatatctggtcatatgtaagcacctgccccctgttcgctacaagcaggctgagaatatcatactcctttgccgtaagattgatctcccggcggtcacggtataacttgcgcctgccgggatagatttccagtcccggcagtgacagcatcggctcatcctttatccttatgtgttcaatatcaggacagcatttcaccacttccataatcttatcaaagatgggcgagtcctgatctttcagttcaagaaccattatacgcacgatgccacctctttcctgctgtttctgcaaatgccgcagaccagcttttttatttcagttcctccagtttcacgctttcgtcagcgccaacctgctctctgctttccgagccgtcccatgtcatctgcccgtcaaagccgtctacggatgttgtcccataggaatacccgacagcagcaccgacatatttccctcccgaaacagtaaattcagaaacggtgcaggaacttatatctgactttgcgggttccggataatattctttgaacatgggagaataaaatccccctccggtaatccctccgatcctctctgaattcctgcccgtttcaatcgacacattctttacggtgccgttctctaccagcgtcggggcattttcaaaagtcccggagtgtcctgcaaggccgccgagcagccagcagttatcgcccgtcacaatctttatattttccgctttacagtttttcgcatactcgctgcaatgaaaacagcctgccagtcccccgatgctgtagcagccgtcaggggcggtaatggtcccgcctgcagtacagttttcaagattgccgtcttcctggccgccaacgatgatgcccgccccctgcatattggcatctgtgagcgtaaggtctgccactgcctcacagtccacgatatccgcatgggatgccccggcaatccccccgatcaggaatctgccctccaccatatttttaccgctgagagtaatcccctctacataagagccgaaatccgcaaagccgatcacgccgccagtgtaattcccaccctttacgcttatattttccactttcaggttcttcgcccaggagccttcccctgtcatgcatccgaacagccctacgccgtctttatccgccgcgtcaatctttatgtttgaaagagtatgcccgttcccgtcaaaagtgccggtaaaggcaagcgccgtgttgggcgtttccgcatcctcctccgcatctgatttcggctcgaagattccgactggattcacggtttcaccgccaaagtcaatgtctgctgtaagtatgtatgacgctgagaggtcatcatatatttttgcaaaatcatccctgctgccgatttcaactgctgtttcctgctgattattttctgtgctgccaacaacctctgacgaatcctgctgcggattgttatcctgcgggttctggccgcatcctgccagtgcggacgacaatgccaggatacccacaagcccaagcgtcagcagtcttgatttcaattttttcatcttccacagtcctttcccgaaacaatagattgcacctgcaatctattgtcatgaattatgccagcgcttttccaagcgccctgcagtcttccagcgcatcttcatccggcgcctcattgcaggtcacgctgtcgcacacaagcactgcgcccgccgtcctgcaggtctcctcccaattacgcatccattccccgtcgccccatccataagagccgaacagcccggtcttttttcctccaagctttccttctacggaatcgaacatcggctggaattcaccttcttccagcacctccgcacccatagccgggcagccgaaggcaactgcgtcataggaatccattttggaaacgtcaaactccgaagctgtaagcagatccgcctccgccccgcctgccttcgcgccttccaggactgcctctgccattgcctgcgtgttgccggtcccgctccaataaactactgctatttttgccataatatgtatcctgcctttctgttaaaatattttttatatatcaaacggccgctgtgagccgttcaatagacttaccctgtgcaaactgcgcaaggcaggcctccgtgcatttccggtactttgcaaatgtctcttttgccttatccgcatcgccgtagaccttccattcccccgcacatttatacccttccgccctgttctcgataaagccgcttacatcttccggcgggtagccaagaaacagcccgatttcgtgcgggaattccccgccgtccgccagcctctgcataagctggataatgcaccgttccggcgcgccaaacgtgtacccgcgtttttctaacagactgcaggcatcagcctgctgtaagtcctgcgacagctttgacggccgatatgcataaataagcgcacacccgtcacggtaccggaggggcagaaccctgatcccctttttcacaaggaccacgttcagcctgcggacgctgtccctcatttcctcttcgtctgcaaagcggcaggaaaataaatttgccgtttttatccctgccagtgtcggcgaacagtaatggacgaatacttcctcagacatacataccctccccgctttcctccatatgcccttccaggattccccggagcgcatttatggagcttgtatgggaacggaccgtccttaccggctttcctttcatctgctccaatgcgctgcgtaccattttatgggacaccgtacttgtaaacagcacaagcagatccggcagcccgatatttttcaggttccctgccattttgggatatattttcgccttacattgatactcgctacacagttctttatattgacggaccatacattcattccctccgacaatcaccacactcattccacttcatctcctttttagttagcaacaactaacttattgtcaaaaataatagccttttgcaaggcacagtaaaattatagcatcctttcttctgccttttccgctccatcaaaacagaaaaatgctccaaaacagcactttttacagagtgctgttttggagcggctgtcactgccattcccggctgctgtgcattttccggtattcgcccggagtctcccccatgatcttctggaatgcagaagcaaatttccccgcattgctgtacccaaattcggaggctatctccaatatggcggcgtccgtatggatcagccgcagggcggcagactgcattttcaaaatccgggtataggaactcacgggaacgccatacacgcctttgaatgcgttctgaagatgggtctgcgatacatggaacctaccggaaagctcagacacagatacctgcctgtctaaattctccgcaagccatgcggcggcttccttggcaaggtctgcctgcagttttgacagcgaaagggcgggtgcgctgttcttttccgggctgacgctcccaagcacgaaaagcagctccaggacctttattttgaaatagcctttcttgcatttttccggcaccgaatacagctcagaaaagatatgctcgatatatgcctgggaacggataataaagcagtttttgtctgcgcacagccgccctgccagttcccttggacggacatttacatcctccaggaagcaggaaaggcactccggcgcggcatcggtatcaatgcatatggaaatgccgtggtaatggcagagggggaagctgtattcactggaacgctgtctttttaccgtaacggacaggtcacccggcataatataggcactcccatcatcctccagcctctgctccatcctcccttcacggcagtggtgtatttccataaagtttccctcttcctctgccccgaagaaaaaactgtccatatgcacagagtaaatattcagctcaattcccggaaacactttgtaggaatcaacctctgcatcacccctgccatttcggaacctgtgtatttccggcccgtattctggaagcctgcctgattcactgcacaggacacagcagatattcctttcatccttttctctgtaatccatcataacacctctttttacaggagccgccatgcagccccttatcctgcctgcaccctgcacagctttatcaaagcatatgcccaaatcctatgtattcagcttccagccgatagcctctttccttccaagtacgaaatccgcatagatgccttcctgcccgatcagctcctcatgttttcctttctggacaatacgcccttcatccaccacaagtatctggtctgcgttccgcacggtcttcagcctgtgtgcgatcatgatgatagtcttatccctggtcagttcctcaatcgccttctgcagccggtcctcgttctccgggtccacattggcggtcgcctcgtcaaggataacaataggagcgtccttcagcatcgcccttgcgatggagatacgctgcttctcaccgccagaaagggatgcgccgccttctccgatgaccgtatcgtacccgtcagggagggcttcaatgaaatctgcacagcaggctttcctcgccgcctccaccacttccgcatgggtcgcctgcggcctgccgaacttgatgttgttctcaatcgtgtccgcaaataaatatacattctgaaacaccatgctgatctgctccatcagggactccagggtatattcccgcacatccttcccgccgatctttacgctgccgctgtccacatcccaaaagcgggcgatcaggttgcagagggtagtcttgccggagccggaaggcccgatgactgctgtggtcgtcctgtcaggcagcgtcacatcaatgccgtggagtatctccttgttctcataagagaaatgcacatttttaaattcaatcacatgtcctttcggcgaaaatgccttacctttctcatccatctgctccattccttccgtctgcaaagtacggtcaatgcttgcagaggcaaggcgcagcatggacattcccatgccgaacaatttgatctgcccgaacacaaggaaggacatcacaatgcacatcagcgcattggcaacaggcatcgtgccatttgcccagcagaaaattgatacgaacatcatggcaatccccgcaatctggagcaccagctcctggaagattgtataaggcgtcatcagcttctccatgtcaaggttgctcttcctgttaaattccaaggcatcctgcgcccttttatctcccctgccgcttaaattaaaggatttgacgatgcccatcccctgcacatattccaagactgcagaggtgagtgccgtctgcgacttctgtgcattcggcgcgatagccgcggactttttctccatggacgagacaattaagaaatatacgaaaatgcctgctgcaacgaccagccccacgcgccattcgaatatcaggatcatcgctgtaaagacaaccgtcccaatcaggccgcccatgatatccaccagcaccatagggaccagcatctcaatattcccaagcaccgtggtgcatacgccagtcacttcgccaaggctgttctcgttgaagaatcccattggcacgccttttaagagattgccgattttaatcctctcatttgccgccatgaaataccctgcgtgtgtctgctgattcttggaaaaagcagtcgtcaccgcattgccgataatgctgactgccataaatgccaatgccgtccaagccgcatcatttcctgtgtttccctgcgtcagagccacgatcacaaaatagatggcgctgacctccagcatatggaacactgcatttaaaaattttaccactacggatttattgatgtttgcccgctccacgccggcaaaccgccatatttttctgaatgcttctatcatgccacatcaccgtcctttgcaccgatatgcgcctgccacatggattcatagagagggcaggtctttcttaattcctcatgttttccggccgcttctattctgccgtcctttactacaacaattttatctgcatccttaatggttgaaagcctgtgggcaatcacgatcaccgttttaccccgtaccagctttgcaatcgctttctggatgactgcctcattttcagggtcaatatacgcggtggcctcatccagtatcacgatgggcgcatcctttagcattgccctcgctatggcaatcctctgacgttcaccgcccgaaaggtgtgcgccgcctccgccaacatttgtttcatatcctttttccagggagcggataaaggcatcgcaccctgcagctttggcagccgcttccacttccttatctgatgcggacagcctgcccatgcggatattttcccggacgctctcgtcaaacagataattatcctgggatacaaatgccacctggtcatagagctgttccagcgggatcttcttttcatccacgccgcccatggaaaccgtcccgtcctttacatcccaaaaaccggcgatgagttttgcaatggtggatttgcctgaaccggaaggccccaccagcgctgtcattccccctgcggggatggaaagactcacatcacgcaggatattcttatcttcatggtagccgaaagaaacatgggataattcaatatccttacccttgatacggacctccttgtcaccatgatgctgttcctctgcggaaagaagttcatccacagatgccaccgttgtaccgaccgtagcaagcgtgtctacaaagttcattgcggcaatgagcggtcctgcaatgccaagggacaggatgatgaccatgataaaggtttccaccggcaggcttccattcctgtaccagagccagcccgccggcaggattgtaaccagcgaggcaggcacgatggaataacccatagacactccgaactggctttttttcatccaattgtagtaataggaggcatttgcctttaccctgtctgcgaatttcgcataagataactttccctggttaaacgccttgatgacctcgatgccgcctatgtattccacgatagtcccgttcatctcctgtgtagtcttcactgctccttcataattcttcgcataactccccataaccgacatcataaatgccatcccaaccgggagcgtcacgatggacaaaagcgccatgcgccaatccagaacaaacaggcagaccacaatgaaaagtggccccgcaatattagcagtcagctccgggaacagatgggcaagtgtggtctccatgccgtccacctgatccacgatgatctgcttcatcttcccgctggacatatccatgaccgtcccaaggggcagcttcggcagtttttccagtattctctgccggatattcttcagaatggaaaaggtcgccttgtgggacacggacaatgccatattgtaaagaagcgtgcgtgcggcataccccgccagtcccagacctaaccatggcagataaaaggacagatccttttcccaagccagcataccgatgataacctgtgccgccgcaaaataaggcagcattcccagcaggacagcaatgagcgcgcttatgaccgcaccgatcagcctgccatgttcgtcttttccccagccccatatgcggagcagcggattttgtttctgcatatcagttcctccttattttagttagttttcgctaacttattggtttattttaaggctgcctgactgttgccagttctggcagccttaagaacttattttgtttccgccgtttcttccccgacgattgccaaaaatcctccatggtggtatttccccatcatggcgacatattttttcgcatcttccctgtcaatcccatggcggaccacttcaaagattccttcaaaatatgcagtgaccatcatgtgataaaaatctgcggtcagcccgcccataggttccagacgggagcctgttgcctccagccacttccatgtgtattcctcttccatggataccagcccgttcacaaaattacagaacttcgtgccatgggaagcatccaatagcaaacggaattcgtcaaagtggtcgtagatgtaatccaccattccaagcatcgcatcagaagaatacttcccaacctcccgtcgctggacatcgctgtcaaaagaatggaatgtttcctgcacatccagacaccgggacatgaactcttctgaaaccggctccacaatggcggcaaatagcccttccttatctttaaagcggacgtaaatggaattggtacttgtttccgcttctgcggcaatcgtccgcagggaggcatctgtgtagcctttttcgaggaattccttttttgcgcattccagtatcctctcatacacgccctcgatctgctttgccacctgttcaccttctctctttaataacagtgtttcataacgatgtttcaattataattcagaaaaacacagttgtcaagagggtatcagtaaaaaatagaattggaagatccaaaatcgtatagacagccaaaaaagctatatcgtgaacagataaaaatagtgaaaacgacaattttcttcacttcttaatactttttaattttgccctcaaggggtgtacaggggtgtatgtccaccttggcaggggtgtacaaaatccgtacacccctaccaaacagcggaggcaagtccctgtcaggcggcataaaaaataaggctcacggaaatggtttttaccatcccgcaagccttatttacagtatttcaaggcgttacaccgcattaaattgtatcaaagtttggttctacacatctatatattttttatataatgtccactccggatgatatcgaaataaatcatcgtaatattgcacttgattttccaaggctgatatttgtgcttcatgttcggtagacactcgtgcatatatcgcaaccactctttctttcatctcattctccttggttgtgttcctacattgtcattacatgttgagtttatcacaaaaaacgtctattttcaacatccactttcttctctgtatcactcttgatttttctataaacatactctgaaatttttccctgattatataaattcttaataagagctaaggcgagaattcgttctaaatcttctttttgcttttttctcatttcctcttcgttcacaatatgtccctccgcttgtgagttctttctttatcaagttcacacaggattattctctgtcatttgtttttgattcaacagaatactgcattttcttccaatcagaatctaacttaaaagttaatgtttttgtaatcaacttagtttctaatctccggcgtaacgcttcatccacgtcataacataaacgcccagttttgtcatatatcattctagtagataattttagaatgtatctttcataatgctttaatataagattgattgcatcaacattcccttctgttgctgcctttatgatagaatatgatggtaatttttcctcatctaatctataattaatcttcttcatccttttttatctcctccatcattttctttaatattttaatcgattcttttttatgttggaaaattgtgctttggactaaattcatttttctcgcaatatcagcatcactcatctccataaaataggaaagtaaaatgacatttctttttctgtctgaaagttcctttaaagcctctgctagcagagtatcttttacagcaatgtcataaccgtacaatgaaaaatgctcatgttccgcttcatattcatcaaagactaacaatttatacaactcctttcccggaacttcatcaaatgtaatttcatgctgtttcaggtgttcctgctttctgatgtaatctactttttcgtcatgcaacactttctgacaaaatcggtcaaattggtggcgaatggttgtttcatcattagaagaaggttttcccataagagttcacctccttccgtttagatgaatttctttgtctcgtcttacacctcttcactatatctcccgaatagaacgggacaattcttcggtaaaaacgggatttttttatttttttctagaaaaacacagctaaattttggaaaatggcaatcaaataagggtcagccgctcacgactgaccctcaattagttcgataaatttaaaaaaaacattgtgaacatctttttgattatccgaaataaaaagccctactcatatcagatgttgagtaggacttttaaagaatacttgatttaattttctaatactatttcacacataattacccaagtgatataagcttactcgcaaagaccttcgccttcgatcactttcactacgctgtctacatacttctcgcagacttgttctctgtaaaaactattttatgttttgctcttgaagttttccatttttcatttcaataattctatcagcaaatttacaaattcctttatcatgagttactaaaatgattgttttttttaactctatttttattctaagtaaaatttctaaaatcaattctgtattaaaagtatctagatttcccgttggttcatcagctaatattactttaggctcatttattaacgctctacaaattgcaacgcgttgcttttctccaccagacaactcataaggataataatcttttttttcactaatcccaagtacttttgtaagttttttcatttttctttcagcaatcgtacttcttgctccatcaagaatttgtggcactaatatattttcccttacggtcatctcatctagtaatctataatcctgaaatataaaacctatttcttttctacgatacccctccatttcggattctttacactgatataattccttattggtataaaaaatagatccggcagatggtttctcaattccacctaacatttttaataatgtagtttttcctattccagactttcctacaacaacaataaattcattatcttttattgttaaattcaagttttttattacataatttatatttttttcacgtgttcttatattccatctttcataatatttacttacctcattaagtgtatataattccatgtcctttccttccctttattgtggttctgaatcaattttatatagctttgccattagcattgcaatacaataataacttccatattgaattaacaatattaacacgcatactgccaaataataaatgaaaatcttactaaactcaccttcctgataaaaatatattattcctaagagtaaaattcccctaacgcaccctaatatcattggataaaatgctatatttttaatttcatgaaaaaaatacttttttctatctttttgagacattcccaatgaaaaaaataacttatacttgtttgttatagaagaatgatttactacttgttttattaaaataattccttgtccttctaatattaaaaatatacctatgatacatactaaaattaacacatattgatcatttttctgttcgatttctatcgcttctgtacgtttccaaacatatactcctttttttattttgatgttatttctatccccataccaaagactccatttatcaatagcattaattttaaattcataatcactgataactaaaatattttctagttttgatgaaacattttctccaaaaataatttcccatctactatcctttactttataatctgcttcctcagaattgaaatatatctttatttcttttttcccttctaatggtttaaaatcctcagaattattttgtgaaatataaattacttcctcattggataacgtttccttttttttaaccatatcttcataagatgataatgaaaatattgcaatactttttccttcttctgtttttccttgaaaaaatggatatgattccttcaaaaaattagtacctttaccataaacaacaaattcatatgggtatcgttcttgataattactttcaatttcatatgataaattagataaaataactcctcctaatacaaaaacaactataaaattaagtaaataaatacttattataagtttagaatttaatttatattgatacaacaccgcatttgacgtaataatttttttatagtccctttttgatatgcatttaacaatccatcttaaacattccgtagaactactaataagataaaaagaaatcaactgtaatacagctgcataatatatagtatgataatttaagcaaaatattattaccacacattctatacatacacctaaaatgggttttagataataaaatacttttgtatcatagttataacttatattttcatttaatccctcccaaaattctagcatattcctttttaaactatgataaaaaacaataattactgacaccaaaatgagcaaaacaagtattacacaaactgcacttccactaataaaataatttttcaagaaatctattaagaaaatctttttttttcgactccatatagcacttgtcatacaaagacatattaaattaacaactattgtgctttttacccctattaataacaatgtaatacaataatctttatataatattttccaaaaatcttttttctttattcctaatataaataaaagagaatatcgatgcgccttaattttgattgcactggttaatatgtacattataataaacattaagccaattattaaaaatattaatacataaaaaaagatcgttcgaatattctctgttccctgattttcccctatattcttcatagcaaccagataactatttataacaaaacttaaaggaaatattgccaaaatgaaactgataactcccatcatttcctcttttgaattatcaatctgtttttgtatttgacacatatttactttatccatacttattctccataatatttaatctattttcttaatgtaattacgtactatgcaaaagtttttattaatatgtacgcttttaaaacacctgttctaatatgttttatataataataaatatccctgaagagattaggaactaacaaacaatttaatctcttcaggaatcctttactaatgtgatttcgcactacttatacaggatgatctacagttatttccacaacttccgctacattcattattgcattttgctgagcaaccacctttacagtttgtattacagctcaaactacaattatgatagcatgcaaaacaaaatcttggctgaatagcattactgctttcaagtccaattttacttgagtaattcatacttcaccttcttcccattatattggttcatactcatttgccatatttccaactttgacctgcacaacttcctgaacatgtaccagtacacattcctgcacaagtaaagaaacatcctcctttaaatggacaaatagcatatgtagttggttcactgcttttactcaatttacttttatacaaatttctcatagttacacctcctcccttcttatgctataaagcatttttattaataaatttatatagaaacagtccgcatttgcataaattgtaaattcttttcataagcaaatactcgctgtatctaacctcgtattgaatatatattggatttcttttaaaactctttttttccatcgaaaaagagttttctataaatttcactattttttcttaaagtaacattgtcgccagaacaaactatagatttattatgcagtacaaagatttccttactctccctaatagaagaaaaatcatgacttaccataattacaattcgattttttgctatctctcttaataaattgatgatttctaattctgtttttctatctaaatccgatgttatttcatcgcatatccaaagcgaagtatcttttattgcagctctagctatggatattttttgcttagttccactagataatgaataaccatcatcaccaattttttctttatatcctcctgatctacacttaataaaactatctaatccaactttttgacaaatctcttctagctcttctctcttaaccgattttcccaatgtaaggttgtattcaatactttcattaaaaaggaccggatttttagggatataactaatttcatttcttatgtttctcaagtttaattcagagtaattaatattatttatatatatatttcctctaacaggttcatacaattttaagagcaattttaaaattgtgcttttccctgcaccattcattccaataatagaatacaaaccacaagaatcaatttttagatttacattttctaaaatattatcagaattgtacttaaagtctactccttctattttcacactttttactttatctatagattttttatcattggatgaatcctcctgaaatcctgctttaatttcttcaatacgtcttatatttacctcacatgcatttaatctcataatgtaatctataacttgagatgatgaattaaacacattactaatatattgattaaatgaaaccaaatttccaatgcttaatttcccgtgtataattaaaatacttgcactcaagagtaatactgtttcaaatattgtattacctatattttttgtaaaattaatttttccctcaataaaaaacattctttttgataagcaaaaatttctctggtatgtttgtttcagtctttccattatagtattttgtaaattaaaacttttgattccttccagatttctaaagttctctgtaatttccgaataatatttatctgaataatcttttaattgcttcttagctttttgatactgtttcctatataacaatgttcctacataagatagtgtcataaaaattagtgctatccctgttaatatttcagaaaaagtaacagcaaaatatattgaaattaccaaacttacactaatttgtatacctcctgtaaaaaaactaatatatgtactagctatttcctcaggatcgccttctactctatttactaactctccttttgcatattgatcaatttgagccattttcatattgattatattttcagttaaatcttttttgatctcattagaaatttgtaagacaattttatttcctaaatatgcttctataacgcccaaaaaaatttctaataatgataagcaaaaaaatatcattacattttttatgataaaatataactgtttttttaaaatcaaatctattatatttccaaataatagtggggtaatagcccccaccactgttcctgatagaatcaagattaaaagagtcactatttctttgtattttgtataaaaatatttttttactaactccgtatgaatttttaacattttcctcccttagataaattaatttctcctgtgttaaagtcaattacccattgtgcattttcctcacctggccattgatattttttccccatctcatcccaccaagcctgcattttctcactaatttgatttagatccttcaatactctgttttctacttctttgttatccattaaaagtaaattttctaatgcaattcttatttcaaacatagttcgtattgtttctgtttcctcatgtgtaacttgtccaataatttttttcataatcattcttttccttttccctattgttccggataaaatcctattgatagattatttagattttttcgtaatatatcaatcggatccttaacatctgatgcttcaagtttatgcgcaaaacaaaattcattttctaactcatcttctatcatcttagatatatttctttcaacccaggttttttgacattgaatcgctgaggaaacatttacttctgttgtatgttttttattatgatacacgcactttgaacaatgatatgcatcgcaaacttgacatattggaaaatattcttgttcatataaatgtttattttttattaaaatgtttccatctattaaagttccaatactttcttctttctcatctttaaagaatgctggacagacataaaatttttcatctggagcaagcgttattgatgtatctccagctccacaattttcatgcttatccaataacaaaatatctgtcaatacattaatttctgtgttaaatgttttagtctcgtttactgtttttactagtaatgttttcagttttaataattgctgtttgtattcctctatgtcaaaatctttatctaaattaaaaatattaatattaatccgatttgattttccccataatattgaaatgacactatataaatcactaattttatctgcagaaatattaaaaatcacattgtctaactgcattttttctattccttttacatcagttgatgtaattaccggaatgacatccttataatactgttttgctttttcataaaattcaataggaactatatgtaaaattttgaactcatcatatatttcatgtttaacgattgtacttccctttttagaatgaataaataccggtttataaaaatgttgttctgcatatttcagacctgcaaatattgcctcatcactcattcttttttcttctaatatttcctcattactattttctcccatgcaacaagctacataatcgttagacagtaataaattcattgtcctactttcatgagaatacacagactctctttcaattccatattgattatacaattttgaaaaatagtaattattagcacgaactctcgctttatgcattttgcaaatatatttagctctctgaaagttagtatacgtatcggctacatcataattaaatccttggcaaaatccacaccctacagcaactggacattttaaacattcgttatcactttgtaatttatacgttacagtttcaaatggtcttactttatcaaaatcaattccctgatcaacatctcctataatataaggttctttattatctaatgaatatgcacaatatctcatacacggatatatttttccatccactccaagtgctagcatcttaccagcaccacaacatgtttgttttaataactcattattatatggagctccaatagtatcatcaaaaagagtacaactatatttgtcaaaaagatgatgatctaatatataatctgctaatgatttcagctgatcttcaaatatttgatcatctccttctttccatacatcttcgtaaactacattagctgctatatcatatattccttcattccaaagttctataatactatcctttaaaaattttaaatcatcacttgcaaaagttacctttgttgttgctacaaattgtttcttccataattctaaattaggttttataatatcataggatcctgacccgtttggaaaaactctttgcagatcatgtttttccttagttccatctacagtaattgtaattcctattttccctggattcttttttataaaatcttgaactttttcatttgaataatttacgccatttgtacatatacttattctatagttccaaaaccatgagcttccttttaaatatgtctgcaatttaaaataatcacagattttatcaattaattccacttctaataacggttctccacctataaaatctaatgttaccgcatcctgatatttaatattttcacttaaaatgtaatctataaatttctttgccacctcaaaactcatttttttatttgaagatttatgtgttatatagcaatatttacacctaagattacaatcctcagttacgataaatgtaattgattgagcatttccatatccccactcggtcattcttttcccaaccgtataattttttgtatccacaacttttcatccctttctgtattatttatcttttttcctattaccaaaaaaacagtaaaaattaatattgctgtctttatacctagacatatttcttttttacccaagtacatcaggcaaatcatcaccaactcttctaatatcaacgttattattgtgtttctatgatttcttcttttctccttttgattcaacaatttattttttgactctataggtgccaataagaaaataattatattgcacatacttaacaatatatctaacaatttttcattaatgaaattatgattttttataacacatattaaaataattatccctattgaagatatacaacattgctgaaccgttcgcgcatgatagcctcctccaaatgttcttaaccatatatatgatattaaaaatgatataacataaattacattgccggttattatacctatactaaatgctataaaaatatttattgtttgttccattaatataaaatatgcatatatataattttccttttcatcattagttataattccttgattaatttggtaaatcacaattttttcagctaagtgtttcacttttcattttccttattttttaatcgtaacccacctggtactttaggttgataatgtacccatatacaagtcgtattaatagaaagcattgctaaaaacattgctatcgaattaataaataaaataggattctttaatcttcttcccacatcgcttcttccctcttttctctgttttctcataagtcatacctcctactacaatttattttcttttattttttatataacatcattttttcattttcaatagacaggcaaaaacagcagaaaactcggctatttttgcaaaagttaactcttatttgaagaaagtagtatctgaaaatgcatattcctattgtaagaaattataattccagtaatatggcaatcaatattccaaaataaaaactattctcgattgttttgactacaatccacaggaatttttgctattaatttaaaaatcaaaatcctcttgcaaaacgtaagtatgctttaccttaagaagatttcttatatagaaaacacctttatatttttctatctcatggatattcttgtctcaagaaacccagattccggtaatatggaaaccgatattccggagcggaaaccaccattgattggcttgattaatactcataaggaatcgaaaaaatgtcaagcccagagccgctttgcgtggcataagccggctttacatttgtgagatttcttgtattctttataattgccaatcgaattccttatcaccggactgcatggacaccgagactggaatattcaatctcattcaaattaaatatttaaaagcaatcaaaatacttaactgaatattacaataaacgctctatttttcttaaatgaacattccaccaaacgactctcatctgcttctcagtaatatgaataatctagctatttaatatccaactataagcgttataattgtatgcagtatacattataaatttgattataaaaaaaagccccaaaataggcttttttatacaagctaaatcacacttgcttcctatgaaactctttgacttaaaaatcataaaacattttacacataaagtataatatatgacaacaggaactaaattcataccatttttcataatcttataataccgtaaatataacagacacagtaaatatattgtcattaacatctatttgtaaaataccaccatatttatttacacaatccgctacattcttaagcccaataccatgtttatctggctcttgtttagttgaacaaaaatcgtctcctttctttttaactattccatcaaatttattttcaactcttatcattaagaaatgtcccttttgtgttgcgaatacattaatatcaatgtatccataatcaattttttttgttgcttcaatagcattatcaataatatttcccatgataattattatatcaatatcttgaataaaatctaaaggtattcctggttcaacatatgcctgataatttattttattatcaatagcttctttctttttttcgcatagaatagtattcaaaactttgttcttacaaaagaattcttcctccatctcccctatccgtatcttcatattttgaattactgatgtaatctcttcattttgatcttgtgcggccaaatttcctattgttctaagcataaactttaaatcatgcatataatttgattgttctaaatttactttttccattctatcataatatttcttttccaaatctgtttttaaagtaagcatttccaatgcttgattctcataattaagtctaaatatatattcatataaaaagaatataatcgcatttgcaaaaagtaatagaatacatccaactaataaaattccttcatttatccctgatacttccaccattaagcccgaataaagcaatgcactatatattccaaaagtagcaattggcaagactaacgaatataataatatttcattttttatcccatatttttgtttgtttaactttttcttaattataaacaacgtgacaaaagttatcaatttttccaaacatatcactataaatctagctaagtgagattgattctcccaactatacccttcaccaagtatcaatgaaagaacaaattcacaaagaatttctactccagcaaaagtggtaaaaaacacagtaaaatagaatactctttcttttaattcttcttcatataatagactataaaccgcataataaatcaaaatattagcaatcaaatttaatttcgaattgcctaaggaattaatcccataaatcaaactaactacccctatatatatagcaatataaaatatcggagagctgtatcgtctacgtagtaatcccctaaaaaataactcgaaaattgtaacttcaaaaatacatgtcattatatttaaaaatacttccatgataattatctattcctcttatactttccaccaagataatctgcaaacctactatgaaatatctttcttttagatcttgaaatatttaacgttgttaaatcctccaatgttataacatcattttttattcctataattgctttaaaatttacaatataactattatgagcatattcaaaagattgattttttaattcttcataagtatctatcaactttttgttgcttgcaaattcataacattgattatccttttttgagaatatatgaatgcagcaccctctttttatgtttgaaatatacgttatattatcaatagcaattttatccattctgccatcatttctaacaacaatatatacttcttttttgttctctatcatcttattgataatgttttttaattcttcatccattttattttctgtataatttttcatcaaatatctaaatggttgaacatcaaaaaattctggttgcggtaattgtattcctgtacaaaaaacaagtacagcatcttgatttctttttctaaatttaatagcagctgtaataccatcaatttcgcccatctgcatgtctaaaaaaaccagatcaaattccaactccaaatcatctataaactcttcacccgaataatatttacaaattgagcttctttcagattttcccaacacctcttttatttttttttccaaatattcagtatatgctatgtcatcatcacagattgctattctatacatctggttgcttcctctcttatttttaatacttttttacagcttatattataaaataatttaaagaattatcaacctattaccttctgatgatcctgttatctcttattctaattccttttttaatcaacaattatacgtcaaattatatcattgctcaaaatatcggtcaatagctcattgtataagacaataaagtcaaaaataaaattatataataattagacaaagataaggagattgaaaatatcaatgagcaaagaagttgaatttaaaaatagagaccgttttatccaacttggtttgaccatagctgctttacgaaaaatgcaaggaatgtcccaagaacaattggctgaaaaagcaaatataagtcgttctcatttaagttccattgaagcacccaatattatacgtcccttttctttagaagtcttatataatattgcagatgcattaaatgttaatgctggaaatctgttaaactcttcatttccatttatagaaaaatagagcttatataaatcaacttattcactctagtaattctttgcaaagagtgaatattgagcttattttttattttcgttttataaataatatttatttttcatatattaaagctgtcatcccttgaaataaagcattaccctatttataataaacatattaatttctattactaaaaatattagtgaattctaaaaacgaaaggctatttaatatgctcaatatctatttaggaaacatggaaaatgtaattttccatcctccaacctattttgataacacatacgaagatgaatggattactgatccattatctgttgaaatgattaaagatgttgacaaatcagttattgtcagctctcatctaatagatagtccagttcttggtccaataccaccagtcaatttatccggtggtgtaaaaacactgatgcttatggcattcgatacgaataatcgggtatttaatgcctcctcctgtggcgacaattgtgcaaaatggatcttgcaaattgcttctcaaaaagatctgacaatcaatttaaggcacattatggactttgggagagttccttttgaagcaaaaattctaaacaatggtcggatagttcacaacatgaatgaatttgtaatgattgccggtgattatgtataattttttctaaaaaacaaaccgtaagaaccaccacatattcttacggtttgccattcaactaattatatggaaagcgaatccaaatatccacggcaatagcatattcttgcatcttatgtaaatgagtctctccgagagagctcgatagctcagagaagcaactacttttcatttaatatttctcttcgatacggcttcatctgatctgctggcaacttaaaataagacttcacctgctcatcagtcaagccttcttccaaacccaacaagatttcattcatctgatctccatctaattttgatgcatatcggataatacactgttcaatcgttccggacaaatcccattcctctttttgcgtaccgaaattcggtacattaactctctcctcgttgaaccgggaatcttctatcaattgcgcttccgaactattttcctctttttctaatccaggcatctcttttctggctttctccaacatctgcataagttcttcttccgttggtttcggatttgtatcaaaattaagatataaaaagtcttcctcattcacttcacagaccttgatgctcttgtctgtcttttcagcttctttatataattccagatctttcttatcaatcacttggaactttgacttatttaagatagttcgataggtcattgtttttgggttatatacgacacgaaccggatgtttatatccttccttccctgcaagtctttcggattctttccagactgctgtattaaacggaagattcttccaatccatgataggatactggccttccataaagattaggcatttcttacgatcaagtctctttacttctcccggtgtcatcaatcctcgtcctgctctctgattatttaaacttgagtttccatgtgcaccactagttacgccatccgttctagtatcaatggtcatttcgccaagtagctttgagatatattcatgtgtggaaaatgctgcaggtcctgaaccaagataaatcataactgcacagttatctaagaatacctcccatttttcctgcggaaagactgctttgatctgtgcaatggactgtaaaataggaacaatcgacagattcctgcttcggattgttcccatcagtacttcggtattggttggtttcgggccagcatagaattcatctgcccataatctcacatggatcggcaagctgccatgacatttatgatctgcaatccgaatcaatacatcaaatagctgggtataaaacatggaaatcaaaaaattaaaggactgatcgttatccggcattaccaaaaacaatgctgttttcttatttggatttccatcgactcctaatcctaagcttggtatatcaatatcatcatcttcaaacagtcgtttaagtgcggctgtttcacacaatctaagcatggcatttaccataatgataatggaacgaactgtctctgttgcaccttcttttaattttcgataatctcttactggtggatagtctgctccatgcgtctctgcaagcctgtccatttcaatctgtaactctgtcttatcctcttcctcctcatcttcaatatgctttgattccatatttacaagttttaatatgttattcagtgtaggctttctgttttcttcctttgcagtcagccattcatgaaagaacatcgactgcagatagagtgctactccatcatcccagaaaggctcccctttttgagcatccgggggcttgaccgatgcctgcatgtttgtgatcagtcgaataacgtctgtttccttctcaagatattgcatcggattatatcggtctgactcttccggattgatcagattaaaagatttaaccattacgccatgagccttcaaataatttccgtgtttccgtaacagatcacctttgatatccaatattacatttgtcattccagctaacagaagattcggtgtcagaacagaagtcgttttataggaaccggaacctccaatcacaagcatattcatgtttgacagagcatgattggatactgcaattcgttcgctcaaataagtattgttcttctcattcttagaatctcttaatgttttactcaatttatttacatccgcccattgttcggaaccgttctccactccaaaatgatagtttcgattctgatccagataatatgcaatgaacatgatccatgcaacgaatgcagcactcatgaatgccggggttttcttcgtccaccagttacggaatggatgagtaaaaatatacaaaagcttttgttgataattactcatggtaactccatctaatttcaaaagcccacatccgaaataacttagaatcattaatatgataagtgccaggataaaagcccaccatggtgttttccttttttcaaccatctttgcatccccctattactactttgctttaatcggtggagttggtgcttttatttgttttttcgctactgtttttccgattgccttttccattctctgctgggcggcctgtgttgccatcttttctttctctgaaatactataatatttttcgaatagttcctttgcaaacggacgcttttctgatttgataggttttaaatcctgatcaatcagaaatggctttttatctttttctaaaaatgccgtatatgttttcgaatcctcggaagcatatacctgatcttttggaattaccagatattggatctcttttccataagttccaggaaccttacttacaaaatagtcctgaaagccttctggtatcttatcttctatcggtttcactaaaacatctttattgatggtgaatttttgatacatctgattcccttcataataatcatagtccatctgattctccgctaactgtactttctccgcagatgttttttcattctcatacttttgatttgcttcttttactgtttcatctccggtattgatatattcttccgtagacatttcagctgttttctgataggtttccatatcgatttcattcagatctgccaccgtttctccacggtttagcatcgattgctgatacaacgcataccattgtcttactttatctgcatcatagtttgcaaccatgatctgaatctgtccgtcaccaagcttcagatctggcattactgtataattgatcttcatggcatcaaaatctgttcggaaaatatcttcttttccttcaaatgggacactgaaaatagatgtttttctttccgtaaatgcaagcaaactatcgattgttttctctcctccggacattttatttccaagatatcttccaaaccatgcttcaaagatttctctgtcctctttgcagacagcaagctgtacataatgatcctctttattcagatctggcatttccataaaacgtacaccgctttctttcaggttttcaaattctcgtaccggatatgcatttgcaccaagacgcaatttttgatctaccggaatattgatcacatcaaattttccgtctgtacgtttgataaagtcctgaatatctttaaactctttcttatcaatgattttctcttttaccatccttgccataaattgtatcatcttcacaagacctattgttcctatcttcatgatcggatcagcaaacatggtagctttttttataagcatcaggacttcttccgcttctctaatttcttcgttcatctctggttttcctccaaaccgcagtctcttttaagagttatccacattttcttctgcccatgtaccgaatttcggtacaaactataatttaggttctatttcgtttacctttcccctgcgattcgtctcatcttttatttctgcctctctttttacttcttcctgcattggaatatgatatcgttccataaactgtttgaaaaatttagtatcctccttaatctcatgcaacattttacggatttcttgcatttccaatctgatctcctctaattccctgttctcttcattcatttgtccattctcctctttttcacgtaccgaatttcggcacaattaaaaaagactcctatctatgaagtcctacctgcatctgctgatttttctttttgcttatgtttgattgttcattcgcttgggtcgtttctgtgattgtcctatcttctctaatcttctctggttcttcctgttctttaccagatttgtcttgttttactacaagttcattgttcgtttctcgaagtacctctgctctttgctctataaatgctggaagttcccggaaaccaatatcattcacataataggctttcatttctccatcacgcttcaaaatcaccacatccgatgtagacatggaatgtcctttaaaaccttctggtcgatcaatattaaatttgatatacaagtcttccaacgtatcctgcacttccaatactccctgatacatcatttgataatcctgcccttttacagacattcccattttctctatgaaatcaagactcatatattgatatcccatctcgttatccacctgatgatactgatagattgcataactattttctgtattggaaaagaatctgctttcctctgcaagctcttctgttttgatatcattttccaattctcttgtcttctgcagttctaacaatttctctgtaatatcagcaatcagctgggaagaagtcaatcgtatcgtatccatcgaacttctaagctccgacatttctttaccagaagaccatccggcaacataattaaaagaataatccgaagtatccagtccaaaatgattacagacaacataggctacgctttcggcttcgacctctattgtcattcgatcctttgtgattccgttttcttccatgacatcacggtcatgaagaatcgcatgagccatttcatgtacagcggttttcatcgtctgtgcctgactcatccccgtctgtattgcgaccagcttctctacattgctgtaatatccctttgctccactatcaatttcctgaaactgaaaaggaactggtgatatttcttccagtcccttcataaactcctcatagataagaacatctcctgctaattcatttacctctaaactaggtagcggttctccttctgtctgacttacatcaaatacagttgttacccggaatcgtggtaagatgcgttctacagtctctgtttctggctgtccatctattccgattacaatttcctgcgtttcttcatcgatcttttccacttgtcgtttctctttcaccggaacaggtgcaatgatcttgattcctttctccccacgcttcacatgacggtgaaactttttctgccaggtctgatatcctgcaagtagtgttgcatccggacgttgcatggcaatcagcagtgtattgttaaaggaatagttatgaaatgtagccattgtctgcaaatacatctgatactgctccgaggtgaagactttttcaacgccttcttccaaggccttcataattgtatctaatttcgattcagttgcttcttttccctgcactctgtaagcggattgttccgcaattcccatttgttgtgtccactgcagcttcgattgttctgaagtataactaatatcgttctcaaaagaaaatacattattttcccgcagagagaagaattcctgattacgtcctacgatgatatgatccaaaacagggattcccataagggatgctgcactttgaatccgatctgtaactgtgatatcctcttttgatggtttcagcgatcctaaatggttatgtaccagcatgagataggctgaatttgaaaggatcgcacttttcatcgtctcccttggatgtacataggccacattcaaagctcccatactgaccacattcatattaatcggtgtaaggttcgtattaagattgactacgcaaaagagttcacggtccatctcacttaaccattttcctaaaactctgactgcagcttccggattatccattggttccggacttaataaaggcggttcttctaccagacgaattcctacttgccttaaggaatcctgaacttccttattattcatctgcatccacctccataaaactgatggaaataaatatttcttcgtctgtagattgaatctctcttgtcaaatcttccagtgtaatatattcctgttcctttgtaacattcgacatttcctcagttcacctccctgttaaccaatatagtaaaggataatattcctgcttgcgtaccgaaattcggtacattacaaggtcttattacattcgtggtgtaaattctgctgttttctttggctgcttcgctgtgttcttcgcaacgtcttcctgcttcgtattcgttacttctttagacagattctccgctttatcaaccgcaagttctaatactttctctttagaattgtaatataatattttatctgataacagatctttggctgacacctctttttcatttacatactgtaccatcttgcggagttctttcactgacttcgaaccatcatccagtaaaatcaaaagttcatgcttggaagacggaaggatataataattgttatctgacaataaactgccaatctgttcaagtacttctgaatgcgctaacattcctgcacctttatatgcattttcatttgttaacgtatataatgattgtccgtccaattttgctccattattttccaaaagattcattggtttggaaaatttaaactgtaaatgagtgattatatcaaacgcatccacaagtaccggtttgttccattttccctctacagataatgcatcctgatgcaattgttctgttgtaactccccacttgtctaacagattctgcgtcacgctaacagacatttcactttccagatcaatagaatccaaaagcaacctgtacttggcattaaaagcacctacttgagtcacaacactattggctaaaacagcttcaacatctggatcgcttaatacaatctgtagatgtttttttgcttcttcatagttgtttatgtaaccttggagttgctcttttgtttcatccatttctcctgtaatggaccatgcttcttccacattttttgcaatgaattccataacagaaaaaatatttttatcttccataaacgcatcatacacttctcccagatggagtctgattgcgtctggcgaattaccttctgaaacaataagactcatcggttttcctgcttcaaacctgcaatctgcaaaactctccggcaaatgatacttaatattctcttcaacaattttcataaaatcatctttattcatctttcaattcctcctgctgttttgtaccgaaattcggtacactgattgttttcttatattcttttagaacagttttttcaatcttctcctgcaaagctttcccagttgcatagattacatcatgatacccatctgcttttttatattggggcatattgatgaagtatcctttctgtccctgcttgatcgtaattccatgaatcgtaagtcctaatacttgaatggatgcaacaccacagatatatgctcttgcatccggtggatgccttggagtgattggacagattgaaaggacttcgatttctggtaaataaaattcctttcctatctcctctttgattttttctccaactgctttttcaatctctttccttaagattgagtccggcacaaggacattttcccattttccattccgttctcttcttggatagctgacaaaagaaaggtctttcccagtctccttattcttatatttacgcagctgtattggaaatcgaatcagatcttcgagcgtgatcattccataggctaatacttcggactcataagataaatggatttctacctgaatcttcattttttatttcgtctgttttgaacaattgcatttaaacgcttcatctgatctaccgataatttttcagaaaaaatgttctcaatctccttcatactcattcccgtctccaaacagctaagaaggtattctttctgatcagcagacaggttctcattatttaaatatgtttcaataaactttcttgtatctggtactgcaaaaaaatacctttgcattcgctttgccaatcctgttcttgcttcctctgtttgtatcttttctgtaataatatcattcatgttagtttccttctttctattttctactcgtgattcttccactggtttttcatctgaacttgtttcttttttctgattttctaactggattactttagacttcatttgttcgatctgacgctgcaagtcaactttctgatactttaacaatttgatcatttcatcctttgaatcaatcagattcttgattgcgtgttccaattcttcctctattgaggaacgcacagctttactttcgtatgcaatttctttcacttcattttttaaattctgaacttcggcaaacgttgtattgtttccacagtatttctttttcaaatattcagaacgtgcttccttgatttgtggaatggtgtatcctgcaagttttaaaagttcattgtcattcattccgtctaatgcacacatgagataccacatacaagtcttgctgtcctttgtttcattcaataactgtctgatttggtctgtttttacatcttgaaatatctcattgagattaatcatattgatttggttgtctgccacttctcttccacctctttcttcttatcttcttgaatctgtacgtttgcttgtccggtcggtttgtaaaaaaatggatgcgactcctcctctcgttttatacgttttatgatctttttttcctgcctgatatgctgtaaattttctttgatctgttttgctgcatcaccttctttcaagcctgtagctggaagtttccgttccatttctattacttttgcttctctcactaacaactcctcgtaggatcttatgttatactgattcagataaagaatattttcatataactgatcgatctgtaacaaagtctttctcacctccctgtaatctactgcataaggatttttcacgttatggtaacgaaaagtgacaaaataccatttccgaattcgctttttttgaaattccacagttagaccaccaaaagcggcttttggaattttataagaacataatttgggacttctcggatggtgttgaatatactcttctttttcaagtctagtcagaatgtctgcataactatatccttcccctaatttataacttcgccaggccctcttttgttctgctgctcggaacgcaaaatagattccatgtttctgagaatttccctttcggacgtgataaccaatcttttccatattttgaagaaattctgcttcattattggagatcgatatgatgtaatcaatgtctgcctgaatcatctttttccagtttggttttccttttttctccgcttcccactgtgcataggattttccttttctattttcttggtcaaattccaatggtggcagtccatacctttcgcagattctgtctgtaatcggctgaatctttttttcccagtctccatttacgtatcggtatttataaccagtcatacggtttacagaattaaatacaatatgcccatgcatatgatgctgatcattatggatggaaaaaacataatcgaaataatctcctaaatattcttcgcagaattcctttattacttgatatgctgtctcttcctttacctcgcctggtttaaaactgattacaaaatgatatccttgccgtcctttcaatttatcccaatctatcttcgtatttatcatcgtttgatatacttcatctgaagtcagccctgcatttcctccaatccattttccttcctctgtttttttcggattcataatatagcggattgaattatttaagtgtctgccccctcccatcttcccctgcttgatattcatcagttttgtgattgccactgtcttcctccaacttttcaatcaacttttttacttcctcttccacctgtgaaagacttttttgtaaataaaaaacggaatcatattttttgtaaccgctgtttatctttgcagctacctgattaatattgactccgatttttcgtatttgaaaatttaaatttttcagttcccggtaatactgtctctcttctttttctttccggaacaaagcatctctgatataagccgaaatatttacacgatccttttttgttccgtatttaaatgtccactcgttatcttctaagattttcttttttaattgctgatactcttgctctgacaaacgaaccgtataacggatctctctccgactcataattaattctcactaaatggatacggattactttcattgtcttgctgtgtaccgaaattcggtacattcatttctgtctgctcctcatgattttcttccgtttcttctgacgcaatttccatctcaagcgaaaagtcttcactgtttttctttaagagctctaagaaagtacccatatttttttcattgatttctccaaagctttcctgcactgcctgtaaaattttttcatttttttctttctggattttttgttctaactcttttttcttcaatagaatttttttcttcttttcctcatactccttcataaaatcatctttttttctttccaatttattctggtcactcaacacttttttcaactgttcttttaaatccattgcctgttccttcctgaaataaaaaagagacatcgcttccgacatcccttcctctggtttctctaagtatagtttatcaaatgtattttatgttttctaggttactttaggtacacttttttcagaaaaatgctttctgctcctctgctgtttcctgcttttgttgtgccaccaacctctttatttcttcaagctgcatggaaacttgatacaataattctgtcacatcttttgttggcttattaagttttgcctctataaaatctgtggcagtcggataagcagtccgatctcgattctcaatcaattggattgcttcatctgacagtctgtaagtttttcgtgttctccccatatgttttcttcctttccctgtatttttgtgttgtacagcattctgtatgacttgtacagctatgcatatgactcatgtacagcattccgtatgactgtacagctatgcatatgacttatgtacagcatttcgtatgacattgcctctttttgtacagctttctgtatgactttccgtacagcatcctgtatgactttctctaaatcaccctaagtgatttgcaagatacgcaaaatgtcagacatttcgcactcttgttagggacaatccctaagacccttttttactgtattttcgttaattattgggtaaagtatgttcattttcttttctcatccttcctgtcaccgtaaagaaaatccaaactgtttctccgcaagctgatatgtgatctggatctgcttcttgtcaatccttgctgttttgaagtctgcttcaaatataatcttttgatcttcctgcacgattttatctgctgaaatagaaatctctcttctcagctcattgttctcttccagaaatttttgcagtttgatttccaaagaattcaaatcttcttctggaatttttccctgcagattttcttttccagataaaactaccgggatattttcctgtcctttttctgtccattcacttggaaggtactgctcttcctcccacaacttggtatccaccgcttttgtatctgcttctttttgttttaaccattctgcaacagctgtttcagagttctccttcgtttctgtccagaagagaaaaaggttgtcttctttgtgatacgtggaaaacaatacacttccatcttccgttgtgaaataaaaaggaatctgactctgtgtttcataaatttcatctgtacaggtcagcttttttgttgaagcaaatgcttcatcctgccgcaaaaaattctccgcttgttcttctaagctttttattttctcacctgaaaaatagttttccaacagattcatattttcaaatacaatgttttctaaagatgcatctttcttttttgcttcttcgttttctctgatttcttcctgctccttcgcctgttctactgtttgttcctttgcttctttctctgtattttttctaatcaaaataattccagcacataaaattccaaacactaaagcaagcaaaagtgcactgataacaattcttttcttcatctttctctcaccatttctttaatgaaaatagttatagccaaggttcactgccttaacaactcttgagttccattctggtttacagcttggcgttcccggattcgcatgggatggataccacgtactatattgaacaacaaactcaaccacacgttccccattctgatgtccatactggttacatcccggatcattttgattcttgatatctccaatcacacaatgtaagacatctccattttcccggtaaaaatctacataatctccaacctgtccatataaggttgtacaggcgatcacatatcttccatcgatgattccaaatccttcactgtcataatgttctccactttgttcccttagctgatactgtagacttgtccgacttgtaattgttctccatcccatataggtatgagttgttcccattccttccgggatttcaatcgtagttccggcaggatattccggattacaataaccggtgatgtagtcacttccaatcgcataacttcttgaatgcactgcatcggaagtgttcccttcgatcgtaacgactcttccattttctacatactgcacaattccaatatgtgtgtcctgaccaaatacaataaagtctcccggctggggtgtatatccttccgatgcataatgaaaccgtcctttgtctgcatagaaccgatgatacgctcgaaccgctgcagctttgggtacgattcctgaatcaatcagtccagcttcgtttgcacaccatgacacaaagcacgcacaccacggagtcacatctccatttacaaattggctccccataacatagttccaatactttgctccacttggattattctcttcctgcaaagcgatctgtacgattctttcaccgcctcctgctatcacaggagtggaagtgaagatagatgctataattcctatgattgttgaaataatcgtgaccactacaatgattggaactaagattgcaagcatcactccaattacaactgcaagaaatgaaaatactgcctgaaccacaacagcaagtacggatagtaatactgcaccaactgccgcaccgatatattttaaagaagacggtaaggaatccattgcatggtttgctgtttttatctctgtcattttggattctacattacggattgcctgctcacttgccatggagcgttcctgcatataatctttgaatttatcagctgcttttttccctgccataacaaccagacttcctccggaagttgccatgccagttgcagctgtaccagaggctgccatattagaagttactgtactggatgctgttgtcatatttgtccctacagtttctgtcagatttgaagttactataccggggcttatttctgttcttgcagttccgtattctgcagaatggtttcttcgtttcccttgaataaactcttgttctgcattcagattcctcttcccttcagaacttctctgctccgaatccacagcttcttttccttgtttcttattcaaaaaccatctgttttgaaatcttttttgtggaactgtaactggatttacaaacgaattctctgtagttttttcttctattcgatataggtccgttgtatatcgaaatgccacacttttttctatggcttctgtatcatccagcgttcgacttaagattcctgtgcgagacttccttttcatttcagatgctttgatgccctcttcaatatatcttcttttctgtgattgcggtaattgattccacttatggatctctttatggtttagaaaccgtgtcggatcaatagacgctgtttcttcctcttgttcctctggttcatttcccatactcagagctgtcatatgttgcttggaagttttaacagattgctttgcagcattcaaggcaagtgctgttgctttaaatcttctatcctcttttgcattgatccgcatcctattcaacctttctgtatcttccgtttacttccttcagcttccctttcttctctaatctctttagatatccaagacaagtttccgtgtcttgattaaacaagcgttccacatctgttaccgtgatatccataatacaggaaacctcaaggatcagttcttcttctttttcactcaacacagaacgtgtttctgttttttctgttgtactgaatttcggtacagcctcctcttcaaaagataataccttttgttcttttgctttttcatggaagttggtactataattcttatacaatacattttctttgctaatcagtgcatcaaacatcacaacctttttattccagaccataacaccctcaccgacatttccagaagacaatgctttaaattcctttgcactgaattcctgaattgcagcaaggctctgtgcatctacccctccctgatctaagaacgtcttataggaacagttctgaaataattcgatcagcgtctgattagataatgctgctgtcacattctgcattgccattgttacgattccaccaaacttacggaacgtaataactgcgttattcagctgtcttgcacttcccggtttcttagaaatcacctgcgtttcatcaattaccagatgcgttgctttctgaaatttcttattataatccatacggatcgacaggtaatgcaggattgtaaccataaccgcttcccagttattctccggtacatttgacattccaaatccaatcatgcggcggttcagactcacattagatggatgtgccagcatatcacagctaccaatcgtatattcttccagactgttgtagatcacacggatcagagctgcatcatgctcattatcaactcgttgtaattccttatagatttcctcccgcagccacaaaagtgtcggttgtttctttagttttttctgttcaaacacttccttaaacatgcgttctgtacatcggctgatgattgagtcatgctcctgtgtgacattgatgtttttcattgcagctgcacacaaggtcttggcatattccgtctgttgtgcgataaattttttctgcactgcgaccgaagaggtaaacacttcttctgatacttcaaacccatttaggaaaatgccgctttttggtgtcagatcaaaataacttccgttgtctttctccacaatatcacggaattcattctgtggatctatcaacataatatcgtcatctgttgcaagcagtgtctgtgacagctcagtcaatttgatcagcatagatttaccggaaccggaaaaacctacgataattccatgcggattcggcagtttctttcgattccccacaatgaaatgctttgtagtacggttgagtcccatcatctgtccacccggctcaatgacatcctgtgcaaagaaaggctggaatgccacaagggaagacgttaagaaaaaacgcatataatctacttgtcttccaccgatcggaagtgccgtattccatgcttttaattgtgtataatcacaggtttctaacacaacaccttctctttttccaattgactgcatctccttcatacgttctgcaagttcttcctcgttatgagctgtaacaacaactaacagatttagaaagaagcctttttcatcgttttcatcaagctgatcgatataggactcgatctcattctttttcttttctctcggataggaagcattaatggccgggattcctgcatttcgcttctgttcgatttcctcggtaatggctctttcgttattgacctgggcattgatcagcttgtcattcaccagatctgtttcaaccggggcataatccagtgtaaggaaagatggataagatacattggataaagaacgaataaaactgtctgaatcaattgactggcggtaacgatgcccgaaaagaaccgtaacaaaggtatctcccatcaccataaagttgggatgctgccggatacttcttggcagaatatcattcttccagtctttttgatgtttcttatgattggataacggagtgatatattcctgttgctccggatgattcggacagatcaatttctgcagtgattcaaaccgttcaaatgcatccagcttttcaatgcggctcccccatcctgcaaatgcttccatgatcgttgtctcaattgcattcaaatacactcttgcattggtttcattatctgctctggtagttacagttaaataacgcagagttgttacattcggattggtttcttggattcgttcatcctgccactgtctgattccctttgcaatgtccggatactctgctttattcttttctgcacgaatagactccaaaaactcttccatgctctgatattcattggataatgtgattttaaattctacatccatcgaatttaaccagaacatcagatccattaaaaatgatttctgctcgcctacatttttattgatgtaattgatatcctcaaaaatataacatctgtcataaaccgccattttttcttttggctcgatcttaaaaatcccattttcaaatgctctgtcgatctgcagtgactgctttacattctttggtagttttacgatcggcattgttttgcttttttttgacagaaacagactgtttccgttaaagattgacatttatcttttcctccttcttgtaggtctttttttcctctgtactttttcctgctttgaatccatagaaaagattctgtaagatgaaaaatctctttcttccatctcataaggaagctcctttgtcttcagataaaaccacacgtttttgatagattcaatccaggtctgcccctgatgctttaccattgcaaggtaaatgattggaaccatgaacggaattcctgtatagatactaagattgatcgcaagtccggttgttttccacacggtaagtgcaatcactgcagcaacaagtaatgcagctgctccatatcccagttcccttgcggtaaatcctttccataattcgtttttgtattgctcttcaaaatctttgttcaaatctattttcatatacacgctccttgctctattacagattgaatgttttattcaaaaatgtcggtgctccttttacggaaactgccatcaaaatcatgtagaccatggaattcaatgcctgtgcaaatccatcgaacgcattgaaaatggcactatcggatgtaaaaatggaaataccggaggtgattcttcctgcgattgcaatcgcaagtgctataatgacaatttcaaacgtattggatagaaagcttttcatccatgcataggctgttccttcgattccacgtcctcctgtgattgaaggcattgcaagtgggaatgttacaaccagaagatacaacttgatatagcggctatacagcgtgatcagaatcaaaaaagaacacgccatagctacaaggaaatagaacaacccatagatccagaaaaacataacagaaccaacatccacatcaccagtaaagaaggccggcggttcaatcatgaccgccgttcctgccattgctgatgccatttcgaaaatctttttgatcacgtccaatccttttaccaacagtacgtttaagacaaccaccttgatcattgcttcgatcataagttcaagtgtcatattttctttgaagtttccaactgctttaaaaaatcccatcatcacaaaaaagttcagactcataattccgatggacaaagcccacggatacaattcattatttacataagtccatgtggcagatgaaaacccttccggtgtctttgtcatgatccccatacatgctgacatagctgtattccatatcgcactggcaatctgatagaacggtccatataataaactgccgttgagaaactccggcaaccagtctggcatctaaatacccccttttttatgctcctacgcttgaagtgattactggaatcaactgtggtgtgataactgcaacaagtcctcctgcgattcgtttgaatgccatagactgtgcaccaccatcctgtgagttcatggactgtgcccattcaaaaacaccccagagcagatacagacttccgatggaagacacgattgctgcaatcagactataaatggtgttaaatcccgtttgaatcactgcacttccatcattttccgctgctagtactggaaatcctatctgcagtacaaaaacagctgacagcatcaaggaaagagtcatcattgttaccaatttttttctatccagtttcatcagtttctttctcatttccttaattcctcccaatacgtaaaactttcactaaaataaatactaatacgagtaataccaccgcaaaggttccaaaacctactaaccccttccatacatccggtgtaaacattgccgcagcaatccccactataacgcttaaaataaatgcgactattactactaattttgttttccaattacttcttctcattttgtgttctccttttcaaaattttgttccttacatggaatcctccgaatcttctgcatatccttgatcaatatatctgtaatcacattcgccgtatcactatctgataaataacgatacagcgcagtttcataatccttataatgactgttctttaaataatctttggatgcacgtaaacgttttgctacttgccctttcggatattgctccaacaaaagatccaacgtctgaggaatgctttctgtcttttcatacagtctccgcagattccgatagaattgtttaggaaactttatttttcccaagcgttctgcatagagatacttcttgtgttttgtaagaaaaagatagataattgctcctacaaaacaaactccggcaactaacgcaaaaacaatgcctgttcccatatattgtaaagctgtcattggtactcacctctctacttctgacggaaacagtcacttacttcatgtactttctccattaaccgttccggagacattgtgttactgaaatatccggaagcataaactctgtgttcctgttcatcataataaaacttcactcccggatgctgtgtattcaagcggacaagaagcttatcaagtgctctgcttttcttctttggggatgaaatatcaaatgctgctggctgtgaaaacaggaaaacataatccagattgttgatatttacatgcagctgttcgccatcctcggagtgtctgatctcggaagagatatattttggctcatttctagccagatatcggttcaaaatagatgctgtcagttcttcaaatacaggtttctctcgctgtaactcacgctgttcctgtttcctgccaaaagtcggaatgtaagtttcttctgtaccgaaattcggtacatttttttcttcctgcgtaccggaattcggtacgtcttcctctttctccttatttgtaccgaaattcggtacgtcttcctcttctctttccggttcttctacctctttctttttctgtgaaatgcttgatactaaagctaacagacgattcttttccgcttccattctcttaacatcttctgaaagctgttttttttcactttgcagctgatttttttcctcttcaagttgcttcttttcctcttcgagttgtttccttcttttatttaactcctcaagttccgcttttaaatatctattctcgttttcgtaggttttcttctccttttcaaggctctgcagatcttcttcattttccttattcattccactaagtaaggattcaaaaaactgggttgcttctcctcccggctttccatcagcatctaaaataagtccgagcatatctaacttgtgttcaaatgattcttttgtctgttttgcctggatctccatatttttagctttttcaatctgtacctgataacgtacttccatggagtcctttgctgcttcgaactcctgctcttttttattgagttcttctttgtcatgttcaagctgttttctttcctcacagagctgctgataccgagattgctgattttgttcgtctatatgcagtgcctcttgttgttgttttagttcctgctctttttggtttaatgtttctttttcctgcttcattgattcaagcagcttatttaatgcatttttctgctttagataatcctgctctctttgctgaaacagtttctctcgttcttgatagatctcgttcagattccggtaaagcggatcctgatttgtttcatttgtcataatgttccattctctcctttcttctttcttcgtgcagaaatcgtccctccgatcacagccacagacatacctaataaaacagaaaaaacaaatatcttgttttcttcccctgtttttggtgcaggatcactcggaatttcttctactgtgttcttttcttcttgcgtaccgaaattcggtacctctttttcttcgccttcttttgtaccgaaattcggtacattttctttttcgacctcttgaacttccagattctgtacactttttagttcttcccgtttcatgtctccaccagttttgagcataaaaaatgcaccaaagccgcagccgatgccaaataaaaagatcaggatggtaatgattactctcttcatcccacttttttcctccctctaaaggatcagtttttcttttgttactttgcaattgacaaccaaacgatacggagtccttgaatatccggtacaggttgctaaagtaaaggtctgcacatcctcttgatccattttccagtcatcctgaaataccgcatcttttttatgacaggaatatacagacacgatcgtaagtcccttggttctctccggcgtatagatataaatactttgtgctccattctcatccactgtaagttcatctaatcttccaaagatctgcccggacatcatgttatgtccaaaaagacaggtatgtggatctgacagcttttcgtttgcatgggcaaaagtaaataccgaacccaagatactgtactttccatcaaatcctttgcttaagtattccctatcggttttgccatgtaagattggctcatccactccgatctgcgggatatagagccatccgatgatatccggattcacttcttttaatagtgcaaaatcaattctccggttcattggatcgaatgcatcctcatcactctccggtactacagcagtctttttgattgcttcatgactgatcttcgcttctagaaatggtttatgttcccggtatgcaaggataccaaaaaataccgccattccaagtaagatcacgataagaaatctgtatactctgtccctcatttaagatttcctcttacgcattctgatgatgcataccaatgctccaaccacgcagattccggcaaggcctgcatatctccatgtattttcttccagatttgtctgtggagctgtattttcttccttgtcctgcttttctgtatgtttcggttcgatcacaacatcatactgcatctccccctcggaatcactccaggttggaactgcgatcaaggacggttcgaccgtatcatacatttcactatcttccgccgaaatcagatacacacctacttccagatttttaaatgtaactgttccgtttgcatctgtcacatttgtattcgtgctttcttctgctttggaaagtagctgctccgctgcatttttaagatcattggagttttcaatcgcattgagatctacccctgcatctttataggacttgagcagcacgtattctccatgcacgatctctgacactttctgacatcggatctttacattgcttttgtctgttccggcttttccatcggtaaggactacctcgatacttccggttctggcctgttctacctcttctaagttctttttttccggcaagacctgttctcctgtttcggttgttgttttatcgatcaccagatcattctcgtttaatgttgctgtatctgccgcacttacggttgacacgctaagagctgcaaatacacacacagcggccaaaagccgcttatatcttaccatcttcatatgtctcccttctgttccataaatacaatccgattgctactgcagcaaacaaaaatggcagacaaaagaagatcagttcccttgcagacggaagttcctgcttgattgcatcatgctgtgctttcttatattccacccgctttccagtcaccagtaacctgtgggtattgattccataaggtgtacacgtaaccagtgtcactagatcctgcccggcttcgatctgcagggcagaaacatcttccggttctaccacctgaatcttacatactttataagcaagcgtgtcatttccaatccgtagaaagaagagatctccttccttcatttcatccaaccggatcaaaagctttgaacttggaagccctctgtgtccggtcagcacacaatgggtattctctcctccggttggaaggcttgtcccctgcagatgaccgatcccattagacagtgcggtatcatccgttccatgatagattggcagttccacattgatctttgggatatccagactccccatcgtcccattgcctgagatgtttagctgttcctcatagctttcatcacttaagatctcggtatcggaatcatctacgattgctcctcctgtctggtaaagcatgtcattataagcaatcgcatggttcatgatttcctcaagttttgtatcatcttttttgcttactgcactttggtaagtagcaacggcatctgactgatgccgctgctcgatcacattccagataattggaagacaacagagtgcaaatccaagaatgaatagaactgctgtgctccatttttttctcatgcaatctcctttccttttggcttagatctcttcgtctttcttacgtccttttgcaattgcaacactcataagaacaacacctgcaccaagcagaatgactacgcttgatgtacccgtgattggaagtttctttccgacctgattcacaatcgtaatatttgcggaaccctcttcaacatcggttgtcagtgtcttgtcttctgacttactcagtccgttatagaacgtcttaatatttgcctttgcatcaaatgctgtaagagttttatctgttgctccatcccctttgacatagctgtcacgctctgttgtaaatgttgctttcagttccagtttgatcggatcctttaataaacggtatccgtccggagcgtctgtctctttgagatagtaggtaccactgtcaagtccgtaaatatggaacgtaccatttgcatcggataccatttctactgctgtgtccggttttgtaccaccggtatggtctgtgccaccaagggaatcacggttgattacaatatatccgtcctgcccggttttcacatagacttcatttttgcattctgcatcactgtacaggcggaattttgctccatccagaactttatcatggtcattggtcttgattggatttaagcggtaagtgaagcagactaccgtatcccatggagtatagccagtttttccttcgccttcagaatctgcatcattggagaactcaagacgtacatcattttcaaatcccggacgacctgtattctctgccgctttgtcattgagtgttgcgttgtatgtaagtgtaacggtctggccgtaagtattctctttgcggttatccactgcatcaaactcacggtctacgattgccttcagatctgcaattgcgatcataaaagtatctccatttcccggattttctgttactacaaactcaccgttattcagtgtataagtcttatcttttccgtctactgttccggagatttcaatcttaacgctcttcttattgaaggtcagtgcgtcattcatcacatcatgccatgcatagtaataggtatcatatccattgatatccggcacattggatgtatacatatacggtacagtctgaccaatctcatagtcaccaatgtcattccatctgtctgcatttgtaatattttcattggcatcatcttcctgaatcttctttgttacacttggataatcagacttgatcacaacctgtgctgccggattcgctgtgtttaccatacaaagagagcttgcggaatgtgttccctctacattggatacttcgtcaatgacatagtaaccatactgcagtccatccagacggatggaattatcggaacgaacattttttactttgaccacttccggtgattcatttaatttcaccatctcatctcttaattcctcgatgaagtaacggaattcactgtaacggctttctaaggtctgatctgtagtagctccttccactggatagttatttaaggactggatataatcgatgacttggtattctgtcacatctgcagctgcgattgttgtacctgcctttgtcagtgcttttgctacgacattctttaaggcctgctcataagccggattgaaggtataattgatggattccccatcttttgcattctctgcatcaaatagtttataaacattgaactgctttccaaccagtgtctgtccatcatttccagcaatatcaatgtgagcctgtccacttcccatcgtagcaacacccttcacggtactgtactctgccccatctgccgcatagacaatcgcagacattccatgatcaagcattggtactggaatggaactgatcgcacctgctaaagcaagggttcctgttaacatgaaagttactcgtttcttattaaattttgtcatttttctcattctctttctccttcgtatttccttttttcatctgtcggattatcgctgcagccatacaagcaagtccaagcacaataaaaattaacgttgcatgatttccggtctctggcatctgtaatccggtgtggttttctaccttcagattcacaattcgctcatgtggggttccttcgattgcgtaatccccggaatcctttgtatggagttcgccatttacatagtattcatactctctcttatcattgatcttggtatagatctcatagacataatcatttccctttgcatcttttgggattcggtatccctgcggtgcttttgtttccttaatgtaatactttttctctacttctaatggactggttgtagcaacacctgtgctatctgtaacaaccttggatacctctttcgtacagtcagcatcttcgtagatcgtaaactctgcaccttccagtaattttcccttttcattgacttttgttactttcagctgatacggagccaaggtatcttccacacctaaacgtgcggttccttctttttcaacctcaaaccgcatggaattatcctttgctgtattggaattcaaagtgattgtattgtctttttcaaccgtgaatgttacaactccgctgtttacagtgtactcatccggtacggatacttcccgtactttatgctgtccatagcctaatgatttgaatttacatgctccgtttgcatccgttgtcacagtctctgtggttccgtctggttttgtatgctcaaaaacagcacctttaatcgcataatcttttcctttttcttttttgacaatgttcaaatccaaagactgctctgagattgttggttcattgtaggtatagacaaactcggaaccattatttccacttgtgatcttgaccgtatatacagttggattgattaaatatccttccggtgcttgcgtttcttgaattgtaagagtaccaagtggtaattgcttacttccagttggtccggtatataattcatcccctgaaactaaatattgagaatcatagtatgcaaatccatctgcatcagttctgaacacccattttctagtagcagtctttccacttgctgccgggtcagaatccatttgtactcctgcatagaatttcactttaaattagttgattgtcttgaaaaatgcttgatttacaggcatattcgcaggtttgcagattgattttactactcatttactacttttaacgaattgagccttgatatgcaaaagcacctgcgaagctgccggataaaccactacaccaccttacgcggcacgtcgaaaagaaaaaataaaataagcaccacctataaggcggcgtttctcactcccacacaggagaacaggaacgctgctttttttatgccctcatgttacgcagtaagggcaaataaagccttgatttatgcggctcttagagcgcggaaatgagaaaggcaagggttgataccttttccctcaaaatcgcgtttctactgcgtaacaaatccaaccaaaggagtgatgaagctatggcagttttccgcgtggaaaagaacaaaggttatacggttatgagcaaccaccatttacgcaacaaggaactttccctaaaggcaaagggcttgttgtcgcaaatgctctcacttcccgaagattgggactacacccttgcagggctgtcccttatcaaccgggaaagtatcgacgctatccgcaccgctgtatgggagcttgaaaaagccggatatatcacaaggcggcagggacgcgacgagaaaggcaaaatgaccgctattgagtacaccatttacgaacagccacagcccccggcattggattgtccggtattggaaaatccaacagcggataagccgatattggaaaatccgacaccggataacccgacgtcggaaaatccaacgcaattaaataaagagatacaaaaaactaacttaccaaaaaaagaaaaattaaatacagatatatcaagtacccattccattcctttccattccctaaatccctctcccttagaggacgcggcacagctgccggaacggaagcgaaaggaagcgacagacgcatacagcgtgtatgaggaaatcatcaaggacaatatcgagtacgactatctgatacaggacagataccttgaccgggacaggatagaggaaatccttgcccttattcttgaaaccgtctgcaccaaacgaagaacaatccgtatcgccggggacgaccacccggcagagcttgtaaaagcaaaatttatgaaactgaacagcgaacatatccgctttgtactggactgtatgcaggaaaacaccaccaaaatccgcaacatcaagcagtacatgaaagctgcccttttcaatgctccgtctacgattggcagctattacacgtcccttgtatctcacgatatgtacggcgggcgcactatccagtcggcaagaagcaagggcatacccgattacacctgcaacgagggcgaaagcctgtaaaccaacccaaaggaggattttatgatgacacagaaaacaggagctttgatttttgatgaaaccgctgaccgctacgacattcgctttgacgtaaacgactattacgggggattgcattgcggcgactgcatggaggtctttgtgcggggcaaatggaagccgacccgtatggagtacggggacaactggtatcttgtgggtattcgggcggcagacctttccgggctgcgggtacggatttaacagggcggagtgaaagcggatgctcttttttcatgcccgtcccgtttcccggcggcgggcataccaccatagaacacgaaaggaggacacccattgcaggaggaaaccaacgaaaagaccatagccctttacatcaagaccggaaagctgaccgcgcagcagctccaaaaggctatgaaagccctgcttgcacagatgaaaaagcagcatgacaaacagaaaatcccgcatggcaagcagaccctaaagcagcttatgaagcagaacgcgggcgtttccaacattgaaatcacaaaggagaatatcaaagcctttgagagtacggcgaaaaaatacgggattgactttgccttaaagaaagacagcaccgaaaccccgccccgctatcttgtgttttttaagggacgggacgcggacgcactgaccgcagctttcaaggagttttccgcaaagaagctgacgcaggagcaaaagccctctatccgcaagctgattgtttccctcaaagaaaaggcggcagctttgaacgcacagcgggagaaagtcaagaacaaagacagggggattgcaagatgaacgctatcaactggaaaaggctgatacttcccaatattccctatctgctctttatgtatctctttgataaagtcgggcaggcggtacgccttgcgccgggggctgacctgtccggcaaggtgctttcccttgcagacggcttttccgctgcctttgcaaatccgcttccgagccttgcccctatggatttactgacagggcttttcggcgcggtacttatccggctgattgtctatgtcaaaggcaagaacgcgaagaaataccgcaaaggtgtggaatacggctctgcccgttggagtgcataattttaagtgtaaatgacacctacatggacgcacaggaggttatgcacatgactgattatagcaaaattacagccctttactcccgcctttctgtgggcgacgaggacagggacggcggcgagagcaacagcatacagaaccaaaaaatatttttggagaactatgccagagggcagcacctaaccaatatccggcactacatcgacgatgacgaaagcggcagattttttgaccgttccgcctactcccgcatgatggacgatgtggaaaatgggaaaatcggtgtctgcattatgaaagacctcacccgctgggggcgcgactatctccaagtcggcaacgcgatggagatattccgacggaacaatgtgcgctttatcgcggtcaataacggcatagacagcgagaagcccgacacgctggagtttgcgccctttatcaatatcatgtcggagtggtatgcaaaggacatcagcaagaaagtgaaaacgggcattaagaccaaaggcatgagtggaaagccgattgtcaccgaagccccttacggctatgtcaaagacccggacaacaaggatttttggataatcgacgaggaagccgccgcggttgtccgtttgattttccgtctgtttatcggcgggaagaaccgcaaccaaatcgccgtgcatctgaaaaacgagcaaatccctacccccactttctatatgaaagaccgggggcggggaacttgtaaaaataagacgctgggcgaggataaccgctgcaagtggaacaaagccaccttgaccaatatcctcacacggcaggagtattgcggcgatgttgtcaatttcaagaccacaaagcatttccgggacaagcacaaccactatgtagacagaagccaatggcacatcacagaaaatgtgcatgagccgattatcagccgcagcgattttgaaaccgtacagcggattttggaaaacgcgcctgtcaaacgccccaacggggacggggaaatccaccctctgtccggcttgcttttctgtaaagactgcggttcaaaaatgcacattcgcatagattaccgaaacggcggcaagcggcacgttgcctattgcagcgagtaccacaaggggaaagccaagaaccccaaatgccattccccgcacatcatggacgcggacttgctcatgcagaccatcgcggaagtgctgaagaaaatcgaggactattctatcagcaaccgggcggagtttgaagccttagtgaaaaagaaccttgtcatgcagcagaccgaccagaccaagaaacagcagaagcgtattccgcaaatcacgacgcgccttgaacagattgacaaggtgctgaataagctctatgaggacaacgccctcggcacgatcccacaagaccgttatgagcagatgtcgcagaagtattcggaagaatactatgcgctgaaagcggagcttgccacgctccaagagcagctgtccgcttatgagaacgcgggaggacgggcgcagaagtttttgaagctgacggaacgccatgctgcctttaccgaacttacccccgccattctcaacgagtttatcagccggattgaagtgcatgagcgcgaccagaaaagggcgagatacgcaatccagcacatcagcatatatttcaattatatcggcaagtttgagaatgaagtgacacagcttgcggaaccgaccgagcaggaaatccggcaaatgcgggaggaaatcgaagaagccaaaaaggaaaagagccgcgcctaccaccggcagtattcaagggagtaccgggcgcgaaaccttgaaaagcagcgggagtatgaccgcatgaaagcgcgggaataccgggcaaggagaaaggcgcaggcagccgccgcacagcccacacagtaaaacagaataaccgtcaaccaagagggattttccgagttacgggaaatccctcttttgcacccggagaaaggagccgcctatggcagaacagacccccgacaatatcatcacgacccagaggaacgggcagaccattgttgcggagttatttttcaatcacagcagcacagaaacattccgcgacaagctgctcaaactggtgcttgccgacagtacgcgtttatccgcgtctgacggtcaagagccggaaaaaacagaaatcttgcgataacagccgccccgacgaaccattccctgtccgggcggtttctatttgaaaatcctcattttccccaagtcaagagccgggaaaaacacccgaaaaatgcccctattgcgtaacaggggcgcagaaaggagagtttatgagaacagggcttacgaagcaggaaaagaccaccgatatttggtttgacgagaaagacccgcttatccatatccgcacccacaacaccgacctcaagaacaggctgaccgcctacgccgtagctcaccccgaccagtgccgccagatcgacgcagacccggacacgggctgcatggagtttgaaatccgcaaggggcgcttctctttccgtctgaccgccccatacagcgaggaacgacgggaagcaacgcggcgatatgccagagaaaacagcactacaaacttgttgaaataatgtggatttgttcatattcttgtgctatacttttctcaaaggcacagaatggcagatataaattcgtgggagaaaaaatatgaagaagcatagaaaatgtaaaaagataatagcttttgtaacagtgttgtttatagcatttgttgcagtaattgggctacacaaaacagggatttatcgttttgatttcttaaaggacatctataaaaaaattgattttcaactaagtacgaacgagcttaacattccgcaggacgctctttcattttctgtttatgatattgaacaggaggaatatttattttacgagggcgatagccaacttcccacagtagcaagtttggcaaaactatttgccattgattatgctttgggaaaagtagatttggaagatattgttgaagtaaatcaagaggtattagaacttgttccggcgggttcatctttagcaaatctgtatgctggggaatacacagttaaacaaatcatggaggctatgcttgttccttccggaaatgacgcagcctatgcgttggcatatcatatcgctaaaaacgaattaggcgaaggttatacagcaacggaatatatagattatttcatgacagaacttagtgagtatttaatcgaagcaggctattccaaaacaaatttatataatgacccaagtggcgcgtctatgcaagctgactctcatttagatgacattaaccgcgtagcgttgaagctccttaactacgattttgttaaagaatgtattggaaaaagcgaattttcaattcaaactccgcaaggtgaatttacatggaaaaatacaaatgaatttttagatgaaaattcaccgtactataatgcaaatgttaaaggaatgaaaacaggaacaatggcatcttcctataacattgttgttctgtatgaaaaagatggaaaagcatatttaattacctgtttagcggcacactcaaatgaggggagatataaagcggtacagtctgctatcaacacgattattgaataatgatgatgaaatatcccgtttaagtaaagtgtcaaaacaataagggtaagataaaacagcacacaataaaacttaatacccatccaaaagggcagccgagaaatcgactgtcctttttctacgccgacaggcagaaaggagcgaccaactatgacaaaaccgagagagaaaacccgtgaggagctgcaagccgagattgaggacggaaagaagaaaatccggcagtttgagaaccgagaaaagatgttgcgtcagaagctatccaaagaggaacgcagaacgcgcagccaccgccttatcgtccggggcgcggtctttgagagcattgtgccggaagcaaaggacatgaccgacgaggaagctgccgcgcttctccggcttgccttgacgagtgaaccagcgcgggaatatctgaaaaaacgagccgggggaacgacaagctgaaaatcccttaggaacaaagggcgcacttatacacccttacgggcgtgtgcgctctgccgagggctttatctccgcacagggattttaccccgcgctccgatatggcggctttgccgcaacaaggggctgcaccccttgcgccgcttcgcggctatccctgcacacccacaaaaacagtacacccgccgttggcgtctgtaccatttttgcgggttttattatcctatccgggaggtgatacccatagccatttaccattggaacatcggcattgtgagccgaggaaaaggcaaatcagccgttgccgcagccgcctaccgaagcggagaaaagctgacaaacgaatgggacggaatgacacatgactacactcgcaaaggcggcgttgtccatacagaaatcatgctgccgccccatgccccgccctcattctctgaccgttcaaccttgtggaacagcgtggagctttacgagaaagccgggaacgcccagcttgccagagagattgacgcggcgctccccatagaattatccagagaggaacagatccggcttgtccgggaatactgttcctctcaatttgtttccagaggaatgtgcgttgattatgccattcacgacaccgacagcggcaacccacattgtcatatcatgcttaccatgcgcccccttgacgagcgcggcgcatgggcggcgaagtccaaaaaggaatatgaccttgatgaaaacggcgagcgtatccgcttgccaagcggcagatgcaagacgcacaaagttgacctgaccggctggaacgacaagggcaacgccctcttgtggcgtaaggcatgggctgactttaccaacgactttttggagaggaacggaagcccggagcgcatcgaccaccgcagcaacgccgagcgcggcattgacgagatacccaccgtccacatgggcgtggcggcttgccagatggagaagaaaggtatcgccaccgagaaaggcgaactgaaccgcagtattcaaaagacaaaccgccttatccgggaaatccgggcgcagattgggaaactcaaagaatggattgccgacctgttcaaagcgcgggaaaccgccacggagcagccgctgcaatctcccaaccttgcaaatctgttgatgaagtatttgagcgttcagagagaaaagagccggaagtattcgcagcgttggcaacagcagcacgcaaccgatgaattgaaaaccatagcggcagcggtcaactatctttccgagcatggtatctctaatcttgatgagctggacgcttccctttcttctgtcagcgataaagcctattcaatccgggagggaatgaaaaccgccgaggaacgcatgaagaagctgcaaaagctaattgaatacgggaagaactatacagagtacaagcccattcacgatgagctgaaaaagctgcaaaacggctggacaaacaagcgcgacaagtacgaggaagcccaccgcgccgagctgaccctatggaacgcagcaagtcgctatctccatgcaaatctgccgaaaggaacaaagaccttgcctattgcggaatgggaacaggaatatgctgacctcaaaacacagagggacagcgattataccaaactgaaagagacccgcgccgatgtttccgagcttcaaaaaatccgcaggtgtgtggatattgcactccgcgccgaccaaccggagcagacgcagagccgcaccaaacggcatgatatagaccgctgaaaggagttgaacttttatgtattacacccaagaacagatagaccgcgccaaccaagccgaccttgtttctttcctgcaatcacaggacgagcagcttacccgtgccggaaatgaataccgctggaagcggcacgacaacctgaccgtccggggaaacaaatggtacaggcacagccagagtaagggcggtgcacccattgattttgtcatggagtttttcggcaagagctttaccgaagccgttgaaatgctgacaggagaaaaaggcgcagccccgccgccggacagaccaatccccgcgtccttttctgacttccggctgccgccccgcagccccgacaaccgaacagcgaggaactacctcacagccgcccgccgcattgatgaagatgtgtcggactttttctttgccagcggcgatatttacgaggatgcagcccaccacaacgccgtatttgtggggcgggacgagtacggaataccgcgctacgcccacagcaagggaacggcgggaaacttccggcttgatgtgaaaggcagcgacaaagcctttaacttctgctaccgtggcgagggcgaaagattgtttgtctttgaagccccgatagacctcttatctttcctctgcctgttcaaaaaggattggcaaaagcaaagctatctggcgttgggcggcgtgggcgaaaaagcccttttgcgtttcctttctgaccgtctgaacatcaaaaccgtttacctctgccttgacagcgacaacgccggaaacgatgcttgcagccgccttgcggagcttgtgccggagggctacaccgtccaccgccttctcccgctttacaaggactggaacgaggtgttgcagcaccgggcagaaatcacagacgggaagtatttgcgggaagcagtctacggcttgaaagagccgccgcaggaagaaaccgttgagattatccgcatgagcgaggttgacacacagaccgttgaatggctatgggagccgtatattccctttgggaaagtaaccattgtgcagggcaatcccggcgagggcaagaccacttttgccctacgccttgccgccgcctgcaccaccgggggaacgctgccgggaatgaagcccttgccgccgttccaagtaatttaccagaccgccgaggacgggctgggagataccgtcaagccacgcttgatagaagccgaagccgaccttgaccgcgtacttgtgattgatgaagccaagcgggagcttaccctctccgacgagcgcatagaaaaggcaatcacgcagaacggggcgcggctgattatccttgaccccatacaggcgtatatgggcgaaaagaccgacatgaaccgggcaaacgaagtgcgccccatgttccgccgccttgccgatgttgccgagcgtaccgggtgcgccgttatccttatcggacatctcaacaaagctgccggagggcagagcgcataccggggcttaggttctatcgacttccgcgcagccgcccggagcgtgcttcttattgggcgcgtaaagcgagaaccgaatgtgcgcgttatcgtccatgacaaatcttcccttgcgccggagggtaagcccatagccttttgccttgacccggaaacaggcttttcgtggataggcgagtatgacatcaccgccgacgaactgctgtccggcgcgggcggcaacaacgccaccaaaaccgaacaggctgaacggctgatacttgacctgcttgcagacggaaaagagcttgccagcgaggacattgtaaaagccgcagccgacgccggaatatccgagaggacggtgcagaacgccaagcgtaacatgggcagtgttttgggtgcaaagcgtgtcagcggtcaatggtacaacttcatcaagaagaagcagccacccgaacccgcaagctgaaagtgcaaaacgcagaccctttgcactttgcactttcgcactttcacgataatttgcgtcaataactcaaaaaagcacttgacaaaacgcttcatggggaaatgccgaagatatacgtccctacaccgacccggtatttcaaaataacgtgctgctcacacagacggaacggcttaccatgaacagccgcccaaagcagccgaagtatgcaaggaataaaaatatccttgttatcgggggaagcggcagcggcaagacgagattttttgtgaagccgagtgcgcccgtaagggcggtataaatcctaccttgagcaagtagtaggtaaaagtatcaagcggcattgtgccgcaacctatcattccccgtcttaccccaaaagggaaaccggagggcgaccatagcatgacggaggacacggggcgctgaagcctcagaagcgccggcgtgacggaatgaaaatccacgtatgaggatggaagctagactgcttgaatgacagcctgaaatcgggaccaagagcgtacccctgacgtagagaggttgtactcgtcagtgttcctgacagtcgcattgtttggctatgcggctgctgatactcggagcaggttcagccacgggaaagtggaaaaaggcgaacgtcacataccgacaacgtggaacgcttgtttataccgtactaaacggggattgcctaaagtgaaatgccgaaaggctatgaaaacgctgaaatgcggggttctgaatattcaccatggcaacagagttcccatagtagtctgcggacgggaaagccgtctacatggcaaaggggaacagtgaatcattttcaaaacagaaaggatggtgtgtgagacactatgagaaatccgattcatgtcttgaaaagccttgaagaaaaggcaagtgtaagtaacaacaaatatgaaagattatatcgcaacctatacaatccagagttctatctccttgcatatgcgaacattgcgaaatcgcaggggagcatgacacagggggtagacgggcagacgctggacaacatgagcctgccgagaattaaccggattattgaatccatacgcaacaggacatatcagccaaagcctgcaaaaagaaagtacattcctaaaaagaacgggaaacttcgcccgttgggaatcacttctactgatgataagttagtgcaggaagtggtcagaatgattcttgaagcaatctatgagccgacattcagcaacaattcacacggtttcagaccaaaaagaagctgtcacacggcacttacgcaagtgaagaaaaacttcacaggtgttacatggattgtcgagggagacattaaggcgtgctttgataacttcgaccatcatgtgttggttgaattactgcggaaaaggatttcagacgaggcttttatcggtctaatctggaagttcctgaaagccggatatatggaacaatggcagtacaactgcacctactccggtgttccgcagggcagcggtatcagtccgatatgtgcaaacatctacctcagcgaactggacaactatatgcaggaatacaaagaaaagtatgattgcgagccagaacgcagaaggacgaccagagaatacgagcgggcgtcccggagatacagaaaggcacgtaaagcgttaatgggcgcagaaaaatcaactcctgaactggtaaaagaatttaaggattccagaaggaagaagatgaatcagcactattacaatccgtttgaggaaggcttcaagaaaatccagtacaaccgttacgccgatgattttgtaattggcgttatcggctccaaaaaggacgcagaaaaaatcaaggaagatgtaaaaatctttctccaagaaaaactgcatttggaaatgtccgaggaaaagacgaaagtcacccattccagtaagccggtacgctatctggggtacgatttcaaagtaatccattccaagaacatgaagcgttgtaaaaacggcgacatgaaacgggtgtggtatggaaaagtattcctgtatatgccgaaagaaaaatggattaaaaaagcgatggaacggggagcgatacaggtgaaacgcaacaatgacacaggcaaagaaatgtggcgtcctatgccaaggaaagacctgatgaaccgcagcgatgcagagattgtgtctactttcaattccgaaattcgagggttatataacttctatcggatagcagaaaacgtaggcgcattgcacaagtattactacatggtgcggtacagcatgttaaaaactctggcaggaaagcacagaacgaatgtcagtgttattaagaagcggcacatggtaaacggagtactgagaatcccatacgatacaactaagggacgtaaatactgcgaattttaccatgatggattcagaaagcacagcgacggctatgacaatgtggcagacgttatgccgagttataggaaatatgacagcaggcacacgatagtaaaccgcataaaagccggagtatgcgagatttgcggggaacatgcagactatttatgtatgcaccacgtaagaacgctgaaatcgctgaaaggcagggatatatttgagcagaaaatgctgaaaatgagaagaaaatctctggctctctgccctgactgctttgaactcttacacgaaaccaaagaatcaaggtgattcatggaaagccggatacgctgagaggtgtacgtccggtttgggaggcggctccctgaaacctactgatgaaagtcagcaaggcgcagggtgcctacctcatatttaatgcaaatgcacagcagttacgttgtaaccgacccgaaaggaacggttttagtcgaatgtgggaaactcttacagcggggcgggtatcggataaaggtgctgaacaccattaacttcaaaaaaagcatgaaatacaatccctttgcctatctccgcagcgagaaagatattttgaaactggtaaataccttgattgccaacaccaaaggggacggggaaaaagccggggaggatttttgggtaaaatcggaacggctcttttactgcgcccttatcggctacatttggtacgaagccccggaggaagaaaagaactttacgacgctgcttgaaatgataaatgccagtgaagcccgcgaggacgacccggaatttcagtcccccgttgacctcatgtttgaacggttggatgaaaaagacccggaacactttgccgtccggcagtataagaaattcctgctgtctgcgggaaagacaagaagctctatcctcatttcctgcggtgcgcggcttgccccctttgacattaaggagctgcgcgaccttatggaaaccgacgaaatggagcttgacaccataggcgaccgcaagaccgccctgtttgttatcatttccgacaccgacgatacatttaactttgttgtgagtattctttacacgcagcttttcaatctcctttgcgacaaggcagatgatgaatacggcggcaggctgcccgtccatgtgcgctgtctgttagacgagtttgcaaatatcgggcagataccgaagtttgaaaagctcatagccaccatacgaagccgggaaatctccgcttcaatcattttgcagagccagtcgcagttaaaagccatttacaaggacaacgccgataccatagccggcaactgcgacaccacccttttcttaggcggaaaggagaaaaccaccctcaaagaaatgtcggaaatcttggggaaagaaaccattgacagcttcaacacttccgagaaccgggggcgggaggtatcgcatgggctgaactatcagaagttaggcaagcagcttatgacggaagatgaaattgcggttatggacggcgggaaatgtatcttacagctacgcggggtgcgcccgttcttctctgataagtacgacattacaaagcaccccaactataaatatctttccgactatgacaagaaaaatacctttgatatggaaaagcatttaaggcgcagacccgcccttgtaaagccggacgaaccctttgactattacgaaatcagcgaagcagatttgcaggaggacaccgaccatgaatagacgtatgcagaagaaaaaagataagaaaatcacagaagccataaacgggcttgttttcattgccgagcgacgggaacagcaacggcaggcagctatccagcagtttgtgaaacggtgtgaagccctgtatgagcagaaacgggtgcggcgggaactttgattttacgggaggttatactatgagcagacagaaaacaaaaactgatgatatacgtcgtgaacgttattttacaaagatgatagaaaatgcagaaaacgctctgcgggagtatttgcaggaacgcggaggggaacagaccctttacgttaccgagtatatgcagcgtaggagctatcttttggaatgacgaaaaatgtgtgttcccggctgaaaagaaaggaggaattgacgcagtaacaaagaaacagacaacttacagaatacgcgcccctactggaaaatccataacgcccacacttaaaaactgaataccgccgcgcggcagacacataagcagcgcggggacttatgaccgcggcagttacaaaactgaccgccgttttttatgcccttttatagggcaagccgcatttgcggcagaaaggagctttatggaattttttaactctgctatcgacgtattacagacccttgttatcgcactgggcgcaggcttaggcatttggggcgttatcaatctcttggagggatatggaaacgacaatccgggtgcaaaatcacaaggcattaagcagttcatggctaattaaagggagcaaaaagaaaggaaaagcacaatccagacggtatcagcggcaggttacaagaataaattgtgattacacaagattggtgctataataagagaaaagttcctgccggggcagccgccccggtggtatggatagaaaggcaggaaagcaatatgcacatcagctataaaccactctggcatacactgttagagcgtgatatgagaaaagaagatttaaggcttgccgccggtatgacaacgaatatgattgccaacatgagcaaagagggaaagcacatcagcatggacacattagcccgtatctgcgaaacgctgaattgtgagattaccgatgtgattgagttagtaccagacgagcctgcttccacaggaggtaaggaacatgagcgaattgaaaccaagaataacagaaaacggaattgattatatccttgttggagattactacatcccagacttgaagctgccggaagaacaccgccccatcggaaagtacggacggatgcaccgggaatatttaagagaagtccacccagccagattgaacacattgaccttgaccggggagttatggacataccttgcagacctgaacgaacaggcacaggaacggttagacaccatcatggagcagatgaaagccaccgagggcgtgaccgaggaattgaagcgtacccgtcaaatggaatgggtgcagcgttgcaataacattcacaaccgagcagaagaaattgttttgcatgatataatttattcatacgggagtaattaaatcggaggtatataagatgattgaaattgtatttggtgaaagtgcctgtggaagtttgaaaattgcccaaacttacggtaagggaaagtatagaggaagtgcagtttcggtctttatgaggcacgaagatgggagtgttccatcttcagatgaaatgaaagaagcacaaattcaagcacaggaacaagaacatattgcttgggagaatgctattccattgggaggcaagagcagtgatgtttattgttttgatatggctcttagtgtgggagatatttctgataatggaattggcgaacagcggaaaaatgttctcaagaaaatgctgtctgtctggtttgtagaggatttagactatcaggttgaagaaaaaatacagaaaattaaaactacattgtcttcggttattgaacgatatgtagctggggaagaagttcgtatttggtatagctataatccggatgaactttgcggtatgtactggcttatgaaacaacttcgaccattaaactgtcagacaacaatttatttggttaagttacctgcctgggaatatggaaaagaaaatactatgacatccaaaatagcatggggtgaggtttctcctggcgaatggggaaaatatataactctacaagaaaaagctaagcctgtatttctttcagcttgtgctatgaaatggaatcaacttcaaaatgaaaatgcacctttgcgtgcaatgctaaatggtaaattgcaaagtgtttcagaagatatatatgatagtttcattcttcgtgaaattgcggaacagccagagcaattcaaaatggctattgttataggtaatgttttaggaaaatatcaacttggaattagtgatgtatggatttctaatcgcattgataaaatgcttgaagatggtgtgttggaaattatacaggacgcaccaaagggagaaacaaattatcgccggatattaagaaaacgaatgaaataataaccacagcaagaaccgctgctacatggaaggcaccccaaccatgcaacagcggttttttttaccgttttttcctctggctgataggcgttcccattttctttgattttttgagaatccgaatgagccagcgaaattcttcatctgacagatttttatagttgataccaagttgcttgcagtaaaggacaaccagcttttcatcccggctgcccttgaaattttcgaccgcttccagattttctttcagttcatcggcaacggtggtctggggtgcactctcactgtcctttttgtgggcttcccgaatatcccggataatgaggttgaggtcatccagaaccatgtgactaaaatactcatcatcgctgatatgggcggcttgcagcactttcaaatgcgggtcatcttcgccggggcgataccgttcaatgatttcatgccggacggtatcgacaagtgcattgagattttgaatctgcatggtggcaatcccgtccacataaatctcaatgtctgcaagaaacttgataaaatctttatgtgtggcaagctcacagagcagacggttgttaatccgactgcttttcagaagtgctaccatctcatcattcaaatgcagctccgtcaatgacgtgttgatctgctccctgttctctgtccggcacagtagataatcaacggaaaccccatagaagtctgccagcgtgataaggttgccatgattgatttccttaaaatcctctttttcataacttccgagagcagatttggaaatacccgtcagctttgatagttcttccagatttaagcctttgtccttgcggagttcccaaaggcgttcctgtatgcttgttgctcctttcatgggcgcacactcctttccggcggtttcattgctgccgcttaactggattatatcacactttccgcaatcgtggaaatttctgatttttactcctaattcctactttgtggacatacggcacagggcacaaaaatgttctatgatacaggtagttcatcgatggattattccaatcgaatgaccagcctgtgtgggatatgcttccccggcgatgtagtgccatgacttttggcagggatatggaggaacccttaccaaaacgagcataccaaagggagcgatacgccgctgtgagattcaggggaggaacgacaccggggagaactggcgaactgacaccgaaatgataccgaaacacgacaatctgatagggggacagtctaccctatcgctgatacttcgggagattttaagcggctctatggctgtaattttgccgaaaatcgccccgaaaccatacactaaaacgggaggaagcgcaatatgccgagaatgagcaaaaagaggaagcatgagctttccttttacctcaatgaccgggggcgtgtcacttacaacgaattatgccggaaatgccagcatgggtgcaggcagagcttccgggcggttgtgattgactgcccccgttatttatccaaacgagcaaagaaaaaggaggaacacaccgaatgaattttgaatttatgacgatagacacaccattgccgccctgtatgccatttcccagagcgttgacaggatttccagtcagcagcaccgcaaaggtcatgtactgccggatgctggacgctatgctatccaaagggcaggaggacgagcacggaatcctgtttgtctgcttccctgttacagccattgccgcagtcttgtcccgcagctctatgacggtcaagcgttctctgaatgaactggaaaccgccggacttatcatgcgggtgcgtcagggcgttggagaaccaaaccgaatttatgtgctgataccgggaaaggaggacgctgcccttgcctgatacctcaaagctggaaaagctcaaccgggagctggagaaaagcgaaaagaaactgcggaaagccatcaatgatgaaaaggcattgcagcaccagttaaagcagcttacccgaaaggaacggacgcaccggctctgtacccgtggcggtatgctggaaagttttctgcaagagccggaacgcctgacagatgatgatgtcatgctgttgttgaaactcatttttcacagacaggacacgcaggaattattgaaaaaactgctggaacggaagaagccagaaaccccttagtttactaagggcgcaattatacaccacccagaggttggtgcattgcgttctccgaaggctcctcgccggagggctgtgattttccgcagtcatggtctgctccaaatcatacaggggacgctacacttcccctgcgctggctgccgccagctacccttttgtggacttgccatctggggacatcttgcattgcaagttgttcccagccgacaagtttcataaaatacgctatcttttcgataggcaatgaagtataataaaattaccaataaatcaaaaattggcgaaggagttgattgatggacatgattagaatacttcaatttttagtattggcttttggtttaaaagaattgtttaatgcaatggaatatcacaaacagaagaaaaagaaatgggtaattgcctctttatgtatgggcatttttgcctgtgcttgtgcaattatttcaataacaggtattctgtaagtcggaattgataaggaaaaggaggatacacagatgaaaacagtaattctttataatattatttctcttatcatcatctttgttttgatttttgtcctaagaattgtcagtaagagtgatttacgtaaaaatcaacaacttattattaaagtcattacaactattttaattgtttgtgtaatagcatttgtgctttttattgatgcaatagcagttggcattataggacctgttccaaattaacaatcccagtttaccatccgcacatcgggtcaatttgccccgaacttttacaattaaatacccgccgcccacatagcggcacaccgagcaggaaatctgaaaaaggtctcctgctttttttctgccaaaatgaggtggtaaaacgccaccccatccaccaattaccgaaaggagggacacgaaatgccctgcccacacaacgaaatcacgattgttcagcgcagccagcgacagtctgcggttgccgccgctgcttaccaaagcggcgaaaagctgttctgtgaatacgaccagcaagtgaagcactacccggaaaagcgtggtatcgtccacaatgaaatcctgctcccggcaaatgccccgccggagtatgcagaccgcaatactttgtggaacgccgccgaagcggtggaaaaacaatggaactcccagcttgcaaggcggtgggtgcttaccatccccagagagataccgcccgaccagtatgctgtccttgtccgggagttttgtgagcagcagtttgtttccaaaggcatgattgctgattttgcaatccatgacccccatccgccgggacacaatccccacgcccatgtcctgctcactatgagggcaatggacgaacatggaaaatggcttcccaagagccgcaaggtttatgaccttgacgaaaacggggaacggataaaacttccgtccggcagatggaaaagccacaaggaggatacggtggattggaacgaccagaagtattgcgaaatctggcggcatgaatgggaggtcatccagaaccgctatctggaagccaatgaccgcccagagcgtgtggacttgcgttcttatgccagacaggggcttgatattatccctactgtccatgagggagctgctgtccggcagatggaaaagcggggtatccagacgaacatcggcaacctgaaccgggaaatcagagccgccaaccgcctgatgaagtccatccggcagcttatccaaaacctcaaaggctggattaccgagctgggagaaaaacggaaagaactgcttgcacaaaaaacggcggaggaagcaacacttcttcccaatctactgatgaaatatatggagatacgaaaggaagaacggaaggactggacgaggtctggacaaaatcgggggacttcacaggacttaaaggcagtcagcgaagccctgtcctatctccagcaaaaggggctttccactgtggaggacttagaagcatttctggaatcttccgggaaatcagccgcagattaccgcaatcagatgaagccaaaggaagcccgcagcaaagtgattgacgggattcttgccagccggacagactgcaaggaatgtaaggctgtctatgagaagtaccagaagatattttttaagaaaacaaaggagaaattcaaacaggaacactcggaggttgcccggtatgaaaaagccgccacccaccttgccaagcacccagatgataaggacagtacccaaaaggagctgcaagaggagcaggaaacgcttctggaagaaatcgcagagttgaaagtaccactgaccgaggtacaggaggatttgaagaagctgcgggacatccgctactgggtacggaaagccacacccggcacagaggaaagtaaagagccgcctaagaagcagcccatcaaggaagtcttgcaggataaggcagacgagaaaaaggctcaaagaaccgccccggcacaggcgaaacacagacaacaggatatggaactttaacaggcacttgccattttcaatcagagaatgtcaggtgcttttcttattttcaaggagggatagatttgaatgtatttgaagctgtgaagcagtccgtcacaacaagacaggctgcggagcattatggaatccatgtaggtcggaacgggatggcttgctgcccgttccataatgataaaaccccaagcatgaagctggatcggcgttaccactgcttcggctgcggtgcggatggggatgtgattgattttgccgccgccctgtatgggctggcaaagaaagaagccgccgtacaactggcaaatgactttgggctttcctatgaggactggaaaccgccgggaaaggcaaaaaagcccaagccccggcagaaatccccggaggaacagtttcaggaagcaaagaaccgctgcttccgtatccttgccgattatctccacctgcttatggcatggagaacggaatatgccccgcactccccagaggaagcctttcatccccggtttgtggaagccttacaaaagcaagcccatgtggaatatctgctggatgtgctgctgttcggggagacagaggaaaaagcggctttgattgcggactacggaaaggatgtgatacagcttgaacagcgaatggcagagcttgcagccgcagacgcagcaagaactaaaaaacaccatgaacgccatgcagccgccccagagcattgaggaaatcaaggcggggctggaaaccaccgagaaaggcggtgtccgccagagcatacggaactgcctgaccgtattccagcgtgaccctctgctttccggggctatcgcatacaacatcctgaccgaccgcaaggacatcataaagcccatcggttttcacagagaaagcacagccctgaacgatacggatatgaagtatctgcttctctatctggaagaaacctatgggcttaccaatgagaaaaagattgataatgccatcgggattgtggcgaatgaaaacaagtaccatcccatccgggactacctaagtgcccttgtgtgggacgggacagaacgaatccgtttctgtctgcggcactttctgggggctgacgcagacgattacacctatgaagcgttgaagctgttcctgctgggtgcaatctcacgagcctttcagccggggtgcaagtttgaaatcatgctttgtctggtaggcggtcagggggctggaaagtccaccttcttccgtctgctggcagtccgggacgagtggttctccgatgatttgcggaagctggacgatgacaatgtgtaccgtaagctgcaaggtcactggattatcgaaatgtcggaaatgatggcaaccgcaaacgccaagagcattgaggaaatcaagtcatttttaagccggcagaaagaggtttacaagataccctatgaaacccacccagcagaccgcccccgtcagtgcgtgtttggcggcacttccaatgcccttgacttcctgccccttgaccgttccggcaaccgccgctttatccccgtcatggtgtacccggagcaagccgaggttcacattttggaggacgaagccgcttccagagcctatatcgagcagatgtgggcagaagcgatggaaatttacagaagcggcaggttcaagctggctttcagccctgccatgcagcggtatctcaaagaacaccagcgggattttatgccggaggacaccaaagccgggatgatacaggcgtatcttgataagtacaccgggagcatggtctgctccaagcagctctataaggaagccttgaaccatgcctttgacgagccgaagcaatgggaaatccgggaaatcaacgagattatgaaccagtgcattgaccgctggcggtacttcccgaacccaagaatgttttccgaatatggcagacaaaagggctgggagcgtgaaaacccggcaacggactccggcaacccgtctgaaaaaacgatggacggttttgtggaggtcacagaacagatggagcttccgttctgaaaatggcagcccgttgcaccccctgttgctatcccgttgccgagccggttgccggggaaaatcccgaaactatcggcttttctcccctatgacaaccaaaacaacagaaaaataaaagaaaagtataaatagtaaccatcgccagattgagattgtttgcaaggtcttttgaagcccgttgccggacttcgttgccgacaccctctgtctggctattttcatgtatggaggataactgcctatggcaaaaaacaaaacagagattcatgttacaacggtgtttgacggggagctggacgcaaccgatgtgttcgtcagcctgatttcccagaaatacggtaagacaaatacgaaagaatatcttgctaaaaggaaagatatgagctataatgaagatgaggttcaaaagagccagataccgtctggattgtgtgggtaaatggctatgatgaacgaaatggaatacagaacaatcggttcggcacttgccggagggtatcgtgcagcggtctattgcaggctgtcaaaggacgatgacctgcaaggcgaaagtgccagtatcgcaaaccagcgtgatatgctggaaaaatactgcgaaaagcagggatgggaggttgtggcagtctatcaggacgatggcttcacaggtcttaatatggagcgtcctgatttacagagaatgttgagagccattgagcgcaggcaaatcaaccttgtcatcacgaaagacctcagccgactggggcgtaactatctgcaaaccgggcatttgattgaggactttttcccaagaaacggtgtccgctatatcgccatgaatgacggtatcgacaccctgcgtgataacaacgatattgccccgttcaagaatatcctgaacgagatgtacagcaaggatatttccaagaaagtccattcctcttatcttctgaaagcgcagaaaggacagtttaccgggtgtcttgccccgttcgggtatcggaaagacccggaggacaaaaaccatctgctcattgacgaggaaaccgccccgattgtgcggctgattttcggatatgccctaaacggtcatggtccgaactatatccgcagacggctggaggaagaaaaaatcccctgccccacatggtggaaccgggaacgggggcttcgcaatacccgcaccaaatgggaaaagaaagacccggaaaacgggcggtatatgtgggacttctccgttatcaaagaccttttgatgaatcccgtctacaccggggcgattgcttcccagaaaaaggactaccgtttcaaaatcggcacgattggggaaaagaagccggaggactggattgtggtggaggggcagcatgaaccgctgattgaccgcatgagctttgacattgtgcagaacaagctgaaatcccgccagcgtccggggcagaccaatgaaatcagcctgtttgccggactgataaaatgcggtgagtgtgggaagtcactgacgatacgctacacaaacgcaaaacatccccagcagatttactcctgcaaaacctacaatgcctttggaaagaaccactgcacccagcaccggattgattatgacaccctttacagccatgtgctgcggaaaatccgggaatgtgccagagccgccctgatggacggggaagcggttgccgaccgcttgaccaatacctgtgaagccgagcagcgggaacagcgggaagcaatggaacgctccctcacaagggacgaggaacggattgaggttctggacaaaatgataatgcggctttatgaggatatgattgcagggcgtatcagtgaacagaatttcaacaccatgctggaaaagacacagaccgagcaagcggagcttaaagcaaaagtgtccgagggcagaaagcggctgtccgatgaagtccagcttgccaatgacgcaaaacaatgggtggaagccattcaggaatacgccaatatcacagagctggacgcagccaccctcaaccgcttaatcaaagaaatcgtcgtgcatgagcgcattgacgaagataaaacaagacacatttctatcgaaattcattttaatctcaaacccatcccagaggtggaacaggtcactgcctgacctgtcccgccgggacggttctcttaaaaacaccatatagattttttgtacgccgccgcccgccatcgagcagagttttacacctaattggggataaaacagctcatggcgggcggcggcgttgcccttatcggcactatccttgtaccgcttctttccggtctgttcggataagattacggagggtagcctatggagagcatacttgacgcgattaacgaatggataaaggaaatccttatcggtgcgataaacggtaatctgtcaactatgttcggggacgtaaatgaaaaagtaggcaccattgcagcggaggtaggcaagaccccgcaggggtggaacgcaaacattttcagcatgatacaaaacctgtcggaaaatgtgattgtacccattgcggggcttgtcattacctatgtcctctgttatgagcttatcagcatggtaacggaaaaaaacaatatgcacgacgttgacacttttatgtttttcaagtggtttttcaaagcctttgttgccgttttcttggtaacacatacctttgatattactatggcggtgtttgatatggcgcagcatattgtgtccggcgcggcgggggtaatcggcggcgatacgaatatcgacgtaaccgaagcccttgccgccatgcaggagggactaaaagatatggaaatccccgaactactgttacttgtcatggaaacgagccttgtaagcctttgtatgaaaatcatgtccgtactgataaccgttatcctctacggaagaatgattgagatatacgcctactgttccgtttcccctatcccttttgccaccatgacaaaccgggaatggggacagattgggaacaactacctaaaggggctgtttgcactgggctttcaaggcttcctcattatgatatgcgtcggcatttacgcagttttagtaggcgaaatggtggtagcggacaatctgcacagcgcgattttttcccttgcagcctataccgttatcctttgtttctccctgttcaaatccggcgcactggcaaaatccattttcaatgcacattaacacagcacacgcgggaaagtcccgcagaaaggaggttttttcttggcgtatgtacctgtacccaaagacttatccaaagtcaaaacaaaagtcgctttcaatctgacaaagcggcaaatcctttgtttttcagtggcacttcttatgggactgccgcttttctttttgctcaaagacagcgcagggacgagccttgcggcaatggcaatgattgtcgtcatgcttccctgcttcttggttgccatgtatgaaaagcatggacagccccttgaagtggttataaagaacatcattcagacaaaattgacccgccccaaagtgcgaccgtatcagacggaaaacctatatgcacttttggagaaacagcgggcattagaaaaggaggtatcagcgattgtcaaaaggacagacaaaaaagacgcgggaaactgcaggaaacaagcgtaagctgacccgcgcggaaaagaaacagatagcggcggttatccggcaggcaaagggggacgggaaagcccacaccgcacagcagaccattccctatcttgccatgtacccggacggtatctgcaaagtggcgcagcggaaatattcaaaaagcattgcttttgaggacatcaactatcagcttgcacaggcagatgataagaccgccatttttgaaaactggtgcgatttcctcaactactttgacgcgagcgtgaacgtgcagctttctttcatcaatcaaggctcacagcaggaacaggcagcgcgggcaatccatatcccgccgcaaaacgacgattttaactctatccgcaccgagtattccgatatgctgaaagcgcagcttgccaaagggaacaacgggcttgtaaagcacaagtacatcacgttttccattgaagcggacaatccggcggcagcaagggcgcggctttcccgtattgaaaccgacgtactcaacaatttcaaggtgcttggcgtatcggcgcaccccttatcgggctatgaacgcttaaaggtgctgcatggggtattccacccggcaggcgagccgttctcattctcttatgactggctgaccccgacggggcttaccacaaaggactttatcgccccgtcctctttcaagttcagggagggacgctactttgctatggggaaaaagacgggggcggtatcgttccttgaaatccttgccccggagctaaacgaccgtatcttagcggatatgttggacttggaaacaggggttattgtcaatctccacattaaaagtatcgaccagtcggaagcaatcaagaccattaagcgcaaaatcacagaccttgacaagatgaagattgaggaacagaaaaaagcggttagaagcggttacgatattgacatactcccgtccgaccttgccactttcggaaatgaagcaaagaatttattgcaggatttacagagccgcaacgagcgaatgtttcttctcacgttccttgtggtaaacatggcagacacgaagcggaaactggaaaatgacattttcgcggcggcgggcattgcacagaaatacaactgcgccttgacccgtcttgactatcagcaggaagcggggctgatgtcctctatccctttgggggagaaccttatccctattcagcgaggtttgacgacgagcagcaccgctatttttattccgttcatcacacaggagctatttcagaccggggctgccctttattacgggctgaacgctttaagtaataacatgatactctgcgaccgcaagcagcttaaaaaccccaacgggcttatcttgggaacaccgggcagcggaaaatcctttgcggcaaagcgggaaatcacaaatgcctttctcattaccgacgacgatatttttatctgcgacccggaagccgagtattttgcccttgtaaagcggcttggcgggcaagtgatacgattatccccgaccgggaaaggcatggacggtacgccccagtatgtgaaccctatggatatgaaccttaattacagcgaggacgacagcccccttgcactgaaaagtgattttatcctgtccctctgcgagcttgtcattggcggcaaggagggcttgcagcccgttgataagaccgtcattgaccgcgccgtaaggaatgtgtaccgggactatcttgctgaccctgtaccggaaaaaatgcctattttgggcgacctttacgacgagctgttaaaacagccggagccggaagctgcccgtattgcggcggcgttggaactgtatgtttccggcagtcttaacgtgttcaaccacagaactaacgtggaactttctaaccgccttgtctgctttgatattaagcagcttggaaaacagctcaaaaaattaggtatgctcattgtgcaagaccagatatggaaccgcgttaccattaaccgggcagaaaagaaatctacccgctactatatggacgaatttcatttgctcttaaaagaggaacagaccgccgcttacagtgtggagatttggaagcgttttagaaaatggggaggtaaacaggcacagtccctacaatcttgcaaatggggattgtgtatgccgtcttaaccgaagccgaaaagaacggttaagaatatcagcggagaagaaaacgggaaaggttttgcaatcctaatccgagtggaagtgtcaaggtaatacttgatacacacgcaacgcatagggcttgacccccggtttgcaatagccgggaatataacagccccacgaggctccgctatcgtttcggtctgcggcataaaccgcaggataaaaagatatgctatgccgggtatgaacagacataccgctgaaaatgggcgaaagccccggagggacagataaaaaactgtccgctaatcacacaacagatacccacagctatcacgcagaacatcaaggacttgcttgcttcccgcgaggtggaaaatatctttgaaaactctgattttgtcctcatgctcaatcaggcgcagggcgaccgggctatccttgcaaagcagctaaatatcagcccacagcagatgaaatatgtaacccacaccgaagcaggcgaaggacttatcttttacggaaatgtggtgctgccctttgtagaccatttcccgaaagacaccgagctttaccgcattatgacgacgaagccggaggaagtgagcagcctatgaaacagttaaaaccacgcgataaaatcacacagaaaatgacccgcgacggtgcggtggaagtcaacgaaacacagcagaccgccgagcgtatcagcagccgggaagcagacagcaacttttcacagccggacaccgctaccgcagagcgcgtcatggaacaccttgacgcagcccatacccgaaaggcaagcaaaaaggcagtcaagaaagcgcaggaagctaccgttttgcgtacttccacttcccgcttgcagtttaccgacgaggaacgggcaacgccggaactggaaacttacatcaaaaaatcagaaaaagcagccgacaaactggacgcggcaaaggcagctctcccgaagcagaagaaactggtaaaagagcgcacctttgaggaagccaccggaaaggcaaagacccggcttcactttgaggaacaggaaaagcccctacccggcggcaaaccccacaataatccgttatcccgccccgcgcaggaagcgggtatttttgttcacaacaaaatccacagcgtcgagaaagacaattccggcgtggagggcgcgcacaaatcggaggaacttgccgagcgcggcgcaaggtacgggacgcagaaactaaaacagggctaccgcagccataagctgaaaccctaccgggaagcggcaaaggcagaacgggcagcgtttaaggcaaacgtcaatttccagtatcacaaagccttgcaggaaaacccgcagcttacaagtaatcccttttcccggttcatgcagaaacaaaaaatcaaacgccagtatgcaaagacggtaaagaaaggcggcgcagctaccgccaaagcagccgccggagcgtcccaaacagcagcaaaaaaagcggctgcctttgcagggcgacacccggcaggcgtgataatcgctatcaccgcgctgcttctgttcatcatggtatcggtagggctttcctcttgtggggcaatgttttccggcagcatgaacagcgtgttagggacttcctacacgtccgaggacagcgaccttgtggcaacggaacagagctatgccgcaatggaaaacgaactgcaaagtgagattgacgctatcgaaagcacccacagcggctatgatgaataccgctatgaccttgatactatcgggcataacccacatgagcttgcgtcttatctgactgcccttttgcagagttataccccgcagagcgcacaggcagagctaaagcggctgttcggcttacagtacaccttgacgctgacggaagaaatcgagatacgcaccaccaccgacgaggagggcaacgaggaagaatacgaataccgtatcttaaatgtgaaactgacaaacaagccgattgcttcccttgcggaagaactgctgaacccacagcagtttgaaatgttcaaagtgtacttacagacacagggcaacaaaccgctgatttttggcggcggctcccccgacggtagcccgtccgaggatttaagcggcgtagagtttgtaaacggcacacgtcccggaaacccggagcttatggagcttgcaaagcagcaagtgggaaatgtgggcggctacccctattggagttggtacggctttaacagccgcgtggaatggtgcgcctgctttgtgtcatggtgctacaatcaagccggaaaaagcgaaccccgctttgcaggctgcgaatggcaaggcgttccctggttccagtcaaggggacaatggggcgcgcggggctatgagaatatcgcaccgggcgacgctatctttttcgactgggatttagacggtgttgccgaccatgtggggcttgtgcttggcagggacggcagccgcgtctataccgttgagggcaattccggcgacgcctgcaagataaaaagctacgacctcaactatcaatgtatcaaaggctatgggctgatgaactggtaagcagccccaaaaagaaaggagaatttactttatggcaaacaataaaattgaccgtatcaataaggaaatcgcaaagacccgcgagaaaatcacagaatatcaaaacaaattaaaaggactggaagcgcagaaaaccgaagcggaaaaccttgaaattgtgcagcttgtacgcgctatgcgtatgaccccacaggaacttaacgccatgctcaaaggcgatactatccccggcatgacagccacagactatgaagaacaggaggaaaatgcagatgaagaataaattcaaacagaccatgacagccctttgtgccgcccttatccttatgggcggtttttctgtccctgcctatgcacaggggacagccacagagccgcctacagaggacgcgaccaacgacagcaatgtagttgtggaggaaaaagaagaaacgccgccccttaccccaaagggcaacgcaacactggtggacgatttcggcggcaataagcagcttatcactgttaccaccaaaggcggcaattatttctatatcctcattgaccgggcagccgagggggaacagaccgtacatttccttaatcaagtggacgaagccgaccttatggcactgaccgaaaccggggaagccacgaaaaaaccggaagtctgcaactgtacggagaaatgcgaagccggaaaagtaaatacgtcctgccctgtatgtgcaactactctgacaggctgcacaggcaaagaacctaccccaacacccacagagcagccggaagaaccgaaagaaaaagggggcaatcccggcgcggtgcttgccttagtcctctttgtgctgcttggtggtggcgcagtgttctactactttaagtttgtaaaaccgaagcagaacgtgaaaggaaacaccgaccttgaagattttgactttgaggactacgacgaggacgagccggaagcagataccggggaaacttccgaagatgaagaaacggaggaagaaaccctatgaccctgtttaccgacaatccctttgaaaagatgatgatacagaaaccgaacaggcggcgtgataatgcgccgcctgttctttatcccccggcttgtgcttcctgcccttataagggacagtccccttgtgtggggtactgtatcagaaagattgaaaacaaacaaccgacagaacgataaaaagatatacttgcgatatggaatatgatataattgttccaaccataggaaatgacagagttaaacaaatttgaagttgaggaaaagaaagaatggaagataaaaagatattgcttgataatattgataaaattcatacaaccgaaatgggaattgatagaattaaaagaaacctaaaaatagatacagcagatgttgttgagtattgcaaaaataaggtgttggataaaaattgcaatatatacaaacagggtaaaaattggtattgcgaagttgaaaatatcaaaattactatcaattcatatagttatacaattatcacagcacatattgttaagtaaaatcggactttggagtgaaattatggactatataatacgagaaatgagaagtgaagaatactgtttattaagtgattttttgtacgaagcgatttatattccagaaggaattgaaccgccacctaaatcagtaatagaatgtccagaattacaagaatatatcgttgagtttggaaatcgaaaacacgataaagccttagttgcagaaatgcagggaaatgtaataggagctatttgggtaagaattatgaatgattatggacacattgataatgatactccatcgcttgctatgtctgtccacaaaaaatacagaggattaggcattggaacttcattattgaaacaactattacaggtagaaaaattggctggatattcaaaaatatccttatccgttcagaaaagtaattatgcagtcaagatgtacgagaaagtgggatttactgttgttgatgaaaataatgaggaatatattatgattgtaaatctataaccgaaagctacagtttgtcaaattattttactatttcatatcgcacaattttatacaatcacttgtaggagcaatcgaaaaatcggttgctcttttcttttacccgaaaggaggaacttatatttgattttagttattgcagaaaagcccagtgtggcgcagacaatcgctgccgtacttggggcaaaggaaaagaaagacggatttctcacaggaagcggctatatcgtttcttggtgcgtaggacatttggtagggcttgcggaagctgccgcctacggggaacaatataaaaagtggagctatgacagcttaccgattttgccgcaggaatggaagtacaccgttgcttctgacaaggaaaagcaattcaaaaccctaaaagagcttatgcaccgggcagacgtttccgaagtcgtcaatgcctgcgacgcagggcgcgagggagaactcattttccgttttgtctatgaaatggcgggctgcaagaaacctatgcgccgcctttggatttcctctatggaggacagcgcaatcaaagagggcttttcccgtctgaagaacggcgaggaatacgacgcgctctttgcttccgcattatgcagggcaaaggctgactggttaattggtatcaatgccacccgccttttctctgtcctttacaatcataccttgaacgtggggcgcgtacagaccccaaccttaaaaatgcttgttgaccgggacgcagcgattaccactttcaagaaagaaaaatactaccatgtgcgccttgccttatccggcgcggaagctgcaagtgaaagaatttcagataaggcagaagcagacgcattaaaaacgacttgcgaagcgtcaaaagcagtctgtacttcccttttgaaagagaaaaagaccgcagccccgccgaaactctttgaccttacttctttacagagggaagcaaaccgcctgttcggatatacggcaaaacagacccttgaccttgcacaagccctgtatgaaaaaagacttcttacttatccgagaacagacagcagctatcttactgacgacatgggcgacacagcggcgggcattattaagctgctttgcggaaaattttcttttatggcgggaaaagacttcacgccggagcttggaaaggtgctgaacagtaaaaaggtatcagaccaccatgccattatccctactatggagcttgcaaagaccgaccttgcagcgctgccggaaagcgaaagaaatatccttactcttgccggggggcgtcttattatggcgactgctgtaccgcatacctttgaagcggttacagcagtttttgagtgtgccggacagtcctttaccgcaaggggaaaaacggtactgtccgacgggtggaaagagattgaccgaaaatacaggacagccttaaagaacaagcccgaaacggacgacgcagacagcgacacagaaaataccctgccgccatttaccgagggacagacctttgaaaatccggcggcaacggtaacggagcatgacacaacaccgccaaaacctcacaacgaagcgtcgctgctctctgctatggagcgcgccggaaacgaggacaccgacccggacgcagaacgcaaagggcttggaactcccgccacccgcgccgccgtcattgaaaaactggtaaagggcggctttgtggagcgaaaaggcaagcagctacttcccacaaaggacggtatcaaccttgtgtgcgtcctgccggacaccttgacaagcccgcagcttaccgcagaatgggaaaacaatctgacgcagattgcaaaaggcaaggaagaccccgccgcatttatagagggtattgaggatatggcgcgggaactggtaaagacctatccgtttctttctgatgataaagcgcagatgttcaagccggaacgggaagcgttgggaagctgcccccgctgcggttctcctgtctatgagggaaagaaaaactactattgcagcaataaggaatgtagctttaccatgtggaaaaatgaccgtttctttgaagaacgaaaagtaacctttaccccaaaaattgccgcggcactcttaaaatccggcaaggtaaatgtgaaaaagctctattccccaaagacgggcaaaacctacgacggaactatcgtattggctgatacgggcgggaaatatgtcaactaccaggtggagcttccgaagaaaaaataactgaatagcaagcataggaaaagagtacccttttccgtaaaatccctgctttctctaccgagaacggcggggatttttgcttgttgggaagtgtcccaaaccctctgttttgtggagggttttaccctctgaaatcttgaaaaaatctataaaatctttggcaaaaacgcgggcgcggggtactgaatgatgaaaccggaacattcagcgtccgcgctgccctttggaaaggaggttacacatggcaagtttacgggacaccgtaaaggactatcaagaagaattacgggacggtatcgcttgggtggcgttttggaaaacgggacgttcttggaacgccgaatatttccaccttgaaatgggcgactacctttacccggaggacagaagccgcatggaagaaatcaagcaggctgaccctgccgccgttgtggtaaacggctattattccggctatcttggcgaggacaggaaccttgacgaactgaccgccggggtgcgtcgccactacgaaaacggatatagcaatatcggggaatttatcgaagcccacgacgacaggctgccgccggagcttatcgaggaagcaagagccgccgcccacgctgcggggctgcctttctctgaaaaagcctaccgggacggcgaagaacccgacccctatctatttgacgggagcatgagcatagaggactacgaacttatgcaccgcatgattgaaaacgaaaggagtgaacgcatggcagaaacgattttaagcgggtatctttctaatcttggaaagtacaccgagggcagacctgcgggcgaatgggtatcattccccacgactgccgagcatttgaaagaagtctttgaccgtatcgggatagacggcaaaaactacggggaactgcatatcacagaataccagtcctctattgcaggactggcagggaaattgaccgagcttgaaagccttgacgaactgaactatttgagcgaacttttaaaaatgcagtttgacgacgaccgggaaaaatttgctgcggctatcacatacggcgaccatacaagggacttgcaggacattataaaccttgcacaaaaccttgactgttactggatttatccgtccgtaaaaaccgaggaagattacgggcattatctgattgaagaactggacgagttggagctgccggaagaagcaaaaaattatttcatgtatgaggaatacgggagggacgctgctatcaatgacgggggcagatttaccgagcagggatatatctacaacaaccgcaacacctttacacagtggtatgacgggcgcgacgtgccggaggaataccgggtaacgccgcagccgcaggaacaggcagaccttgacgctgccgcagccataccgaccactgccacagagcagcccccggttctcccgattatcctatcttccgaaaagcccgctgacaaaatgaaagagattaccgaccgactggaacagggcattttggggatttatgaaagcgaccgttacgccgactatctgcgtactatgtctaaattccatgattacagcctaaacaatacaatccttatcgccatgcagggcggcaaccttgtaaaaggctataaacaatgggaaaaggaatttgaccgccatgtaaagccgggagaaaaagctatcaagatacttgcgcccgcgccctttaccgttaagaaacaggtggaaaaaatcgacccggacacgcaaaagcctgttttcgataagaacgggaaagccgttaccgaggaaaaggaaatccaaatccccgcctttcgtgtggtatctgtttttgacgtatcgcagaccgagggtaaggagttgcccgaccttgggataaaggagcttacgggcgacgtggaacagtatcaggattttttcgctgcccttgaaaggacttccccgtttgttatgggatttgaagcactaagcggcggcgtaaaaggacgctgcaattatgaggaaaagcgtatctctatcaacgagggtatggacgaattgcagaacatcaagaccgcaatccatgaaatcgcccatgcaacactccatgacatagacaaagacgcgccggaacgtcccgaccgccgcacccgcgaggtacaggcggaaagcgttgcctatgcggtctgtcaacattacgggcttgatacgtccgactattcttttgggtatatcgccgggtggagcagcggaaaagaacttgcagaactgaaaggctctcttgaaacaatccgcagcaccgccgcaagtctgattgataccatagacggacattttgcggaaatccaaaaggcacaggataaggaacagaccaccgaacaggcacagaccccacaggaagctaccatacagcccgaagcagaagtagccgcgccggagcttcccgaagaaacagccccggtacaggaaaaagaagcacagaccgagccggaagctgatacaggcgcaaacagcgaagcaccgcagactacacagccgggacaggcagcccccgccgcaccttattacacaatcaatgaagctgccgccaaacgtgcaaaggatatgaacagcttttctgattataagcaaggcagcgcgacggctgaatacaggcactatgtagatgaagccgtacagcttgcagaaaggcagaaacaacgggtagacccgatgtaccatgagaaaatcgacagcctgcttgacacttacgcccggaaactggcggcgaacatgaacaaaggctatgagattgacgcgcgtgttccctctatcctcattgcgggcggctctaacttccccacaaggaagaaagaaaagcagaacgcagcccgcgacagcaattaccgggaatggcaggacatacaaggacttcttgataaaatccgcagcaccggcatgggcggtatcagcgcagacgacccgcaggcagtacagaagttggagaagaaactggaaaaccttgaaaaatcgcaggaaaccatgaaagccgtaaacgcctactaccgcaagcataagacccttgacggctgcccgcatttgtcgccggaacagcttgaaaaactgaaagcagacatggcgagcagttggcatttgggggacaagccttttgcgacttgggcgttatccaacaacagcgcagaaatcaggcgcgtaaaagaccgtatcaaatccctttcacagcaaaaggaaatcggttttgtgggttgggaatttgacggcggcaaggtggaagcaaacaccgaagcgaaccgtctgcaaatcttctttgaagataagccggacgaagccacgcgggaagccttaaaaagtaatggcttccgttggtcgcccaaagcaggggcatggcagcggcagcttaccagtaacgcctactatgcggctgattatatcaaggcgattgcaccctttaccggggaaaagcctaccgagttacaacgggcgcatatccgggcgcaaaaagaagcggcgcagaaaaagcccgaacaggaagccatttacaaggtacacgcaaatccccgcagcgacagcagggacaacctgtatctgctgcaagcctacattccgcaggaggacgggaaagcaaagataggcgacgttttgtatatcggaacgccggagaaatgccgagagcttatggcgcagcttaccgccggggagctgacacagggagaagtcaaggagctttacgcaaagacgcagaccgccgcgccggaaatccctatgccagaccctacaatcagcgtcaaggatatgcaggaatacggctatgcttgggacggtatgcttccgcttcagcaggaagccgctgaacgccttttccatgaggatatgtccgtttatcttctctatgaggacggcacagaggggcttgttgataccttggaggatttacaggcacacgcacaaaaaggcggcttgttcggcgtggaaaaggaaacatgggaagccctgcgggagtacaacgccatgaagcaagaactacgggaaagcgagccatcaagggaagctctcttactctatgggaacgaggacactttcggaatttatcagctaaagaacggcaaagaaacgcgggacttgcgctttgagccttacgaccgcatacaggcggcgggaaacagcattgacagaggcaattatgagcttatctataccgcaccccttacgccgggaatgtcccttgaagatatttacacccgcttcaatatcgaccacccgaaagattttaagggacacagcctttccgtttccgacgtggtggtgcttcatcagaacgggcaggacaccgcccactatgtagacagcttggggtataaggacgtgccagagtttttgcagccgaaaaactatttgaaagctgccgagcagaccaccgagcaaaattacaacatgattgacgggcagataaacaacaccccgaccgctgcggaactggaagaaaaagcaaaagccggaggacagatttcccttgcagaatacgccgaagcattgaaaaccgataaggaacgtggcaagcctgccaaacaggaaaagccctctatccgggcgcagcttaaagcagcgaaagaacagacaccaaagaaacaggcaagacagaaaacacaggatttggaaaggagctgacctatgaagttacaaaaatttgaaaatgtggacgttatcgcttcccttgaagccataatgaaacagaataccgctttttatcagagcgattttgacatagacaaacagattttgcagaaagcggcggtaagccctgtcccggaggacaaacggcttttgtggttttcccgcccgtccgggacgtgctgcttccgggaacgggacgtttttctaaaggacacaaggcagcataatacatggcggttttacggggaacagacccgcgatactatccttgcctatgcggtggaactgacaggcacagagcaggaaaaaatcaagggcaatctttatgaactggattatttgcagcatttccgggaagtaatcgaaaaatcaatccctgccgacaactacacgctgatttatgagcatggggagctgacaaaacctgccggacaatattttgacgggaacactgacccgcagcttggaaagtttatacgttttgaagcacagccaaacgacccagaagccttaaaaagcattttgagggaacagcagaaaaaacgaacaccgcatacgcagggggattttcagttacatatcgccgccctgcatgacagacggattgaagcagaagcccgccggattgtggaaaatgtaaaagggcttggagaaccggacagccccgaaaagacccattgtgcggtagaactttctccctactttgttccactggcaacggataaggatatggaacggctgctttccatgctcccttacaaaagcctttccttttctacgttggaggacaggcatggcgtttatgcgctgatagataaaagcgagaggaataaagagatgaaaaagtcccgtccctctgtccgggcgcagttacaaacagaaaaatccccaaaactcccgaaaaagacagcaaaatcaaaacatcacgaattggaggtatgagcatgattagactgaccgttgaagaaatgaacctgttgagtatttaccatgagggaagcaaggcacagcttatggaaaatatgacgactgcgctaccattcatggacgaggatatgcgtccctttgcagaacgcaccttacagaaaatttccccactaacagaaaacgagtatgcggagatttccattttcgccgctgatgaagtatgaccgggagtaagcggctcacgccgccacagagccggaaagtcaacagccttgtaaaaaaggagtgctgcaactgcgagcgcggacactgtatcttattggacgacggggaggaatgtgtctgcccgcagcttatttcctattcacttctatgcaagtggtttcagaccgccgtacttccccttgataagttgctctatgcagagcttttcaagaccgaggataaaaagcgttgtaccgagtgcagcacgttctttgtatcaaaatcaaacagcgtcaaatactgcccggactgccggaaacggattacccgcagacaggcagcggaacgcatgaggaaacgacgcgcggcggttacgcaataagggcgaaaaaagccttgatttacagggcataaacggcgtgaaactggcataggcgatacagaataccttttcccttgaaatcggggttctactgcgtaacattctaaaatcagtacctataaaagaacagggtgcgggaggtcattactggcttcctgcaccctgttctttttgtgtctgactgtctttatcctgcatttccggcttcggctgtaattctttttctatccggttccggtaatgggttttcctgcggtaaaaatattttgttacttcctgttccggcagccatatccccgcagcttctatctgttccataacagcggcaacgatttcccggttgttgcgtttatgcggctcctgtcccttttctatccaaaggcggcggtattcctcataaagccatgtactgatagtttctttttgccgttgcttcaaatgtcgaaactgcttatctatccgcagcagcttcccgtctacctttttatgattttttgtcccgatttcttttttcctctctttccatttcttcaaggggaaattgggggagggattctatcagcttcattgtgatatactggcgcatatcttcatcaatttccagtttgaatgttccgtccggctgacgtttctttacagttgcctgcctgtcgatttcgtccttgtagcacataagcaccttttccaccgcccatgtttctccggcaacggcggcgcgtatggtttcataatcgggtattgtttggtctgccatgttttcacgctcctgtctgtattggaatatctttatcctaccacgcttttatagatatttctactgtaagcgttcggtttccctgctccgttccggttctttttccagtcttaaaatactgtctatgttctgtttgataacgtcgtattccttgacctgttttttcagcttgccataatcagtgtaaagggcttctttctgcgcttggagcttcccgtattcttcctgcatggcggcgagattggggagcttggtaacgcccgacgctttcagtgtctttgccgccgcttcatggagtatcagactgctttcattttttgcccggtatgcgtctttatcctttgccctgcggtatgcttcatagactggttttgtcttttgataggtggtaacgtgcttcatcagcaccgccatatctgcaagacgcttttccacactctttaatgcgtctgcggtcttttcgttttccgcagttatttcttcaatccggctgactaaatccgcgtactgctcaatctgatgttctgtcaagaaattcatggtctttgccgccagtttcagattatggattttcgcccactgttcatagccccggctctcttgtgccttgatactgttttcaatgtcgataagcagcgatacgccacgctgctctttgggagctttcgctgcctttgtgcgcttgcctgcaatccgttctttgattgcttcctctgtataatctgcaccgagggtttttaagcgggtaaaccgttcctgtccgggagcgcggcaggagatatattttcccggctttatctcatagcccgctgcctgtaaccgctgcaacaattcttcaaaacttgctacttgggggataagcgtatcaacggcaatttttagcttgcctttccaacttgtaccgaccttttccgcttgatattctgcatagctttttcccttgctgcctttgcccggaacgacgacggacagcccgttttcccgacacagcttgtcgctcatattccgtatgccgtagtagctgcgcttattggaattgtacttatggtagtcaacaaagttgaccgcgcaaaaaatgatgtggttatggatatgccccttgtctatgtgggtggtaaggacgtattcgtgctgtccctttgttgctgcgtcggcaagctgctttccgattgcatgggctttctcacagtccacctctcccggttcaaacgattgtatcagatgaaaggctaagttgttccctttctgccgagcctgcgacaaggtatattcaaactcaatatctgccgtttcatagctgcacccaaaagaggacacaagcgttttcccgtctgtcttatccggattttggatataatcaagggctttgctcaacgtgcttttaacaggcttaatctttgtaaccgccatatctctgcaagcaccccctttatttcctctatgtcctcttggtagacgctgcctgtcgcattgacacgctttgcaatctgattgatgttgaccccgattttctgtatctccgctgtcatggcttttatatcgctatggtctgtctgaatgatatagccgtcaatggcaatcttgcgaagatacgccgccatgttttgggtagggacgagcttcattttctgctcaatcaacaccctttcttcctctgttacatagaatttgatttgtacttttcttttgcgtccgttcatgcaatcgctcctttccgctttgagggtttgggacacttcccaacaagcaattttcaaccgacgcaccgcaggacgggagggcgaaaatacggaaaagggtactcttttcctatgcttgctacgaaagttttttcctcactggttactacaacgcaatgctctatatgccaaaaaagagcaaaagaaaaacgctgcaatctgtaaagattacaacgcttcctaaatcatattcaatttgccggacacatttatttgtcctctttttcgacttctgaaatttcttttgcagttgccgttacaatccgtatgccattatcgctcatatcatcaaggagagcgtcgagctgccgccgctttgtatctttttgggtgggcgtatctaaaagaaactggtctacggatatattgtaacgaagcataagctcaaaaaagatttgcagactggggtgctgtcctttgttttcgatatttgcaagatagcgaggagaaatatacatttcatcacttacctgtttgcggctttctttgcgccccgtccgcgcagcttttatagcttctccaaatgccttgaagtcatatttttctaccggtctttttgccatatttattcacccagttacattttactgttcccctttctctttggatatgtctatacagttccactaaatagccataataattcatatttatatacttgctattgttcgtgtgtccgactataattattatgataagattttcagaaaggacgggtgttgttatggaatatatgtcttgccccgaagcagcaaagaagtggggaatttctgaaaggcgggtacagatactttgcagggagaaacgcatacagggtgtttcaaaacttgggtatatgtggttgataccaaaagacgcggaaaaaccgattgacggtagaaccaaacaaggaaaggagctataccatgaataaagttttgattatagatgatgataaggaactttgtgcgctgattaaacgcagcgtgctatcagaagatatagaagctgatttttgtaatatgggaaaagagggattacaaaaattaaaagagagagaatatcaacttgtgatactggacgttatgatgcctggtatggacggatttgaaacattggaagaaattagaaaagaaagcagcctgccgattttgatgtttacatcaaaaaatgacagtgcttctaaagtacgcggtttaagggcaggagctgatgattatttgacaaaaccttttgacatggacgaactgatagcccgtatcgtttcccttatacgccgttatacccgtttcaatcaacaggacggaatatcacagcaacttgaatttgacgggttgaaaattgatattgaaaatcgttctgttactacggaaaatggaacttttgaattgcctccaaaagaatttgacttactcttatactgcgcgaaaaatcaagggaaaattctgacaaagcaacagatttatgaagaagtgtggagagaggaatatttctatgatgacagcaacattatggcgattatcagccgacttcgcaagaaattagaggtaaatcccggaagtccaaaatatattcaaacgattaaaggtatcggttatcgttttaacaaggaggtttgattttctatggaagcagtcatttttctatccataataattgcacttttctctattcttgtttcctgctttgctattcgacgtgttaaaaaacagatagccgagataacagacgcattgattgatgtaaaaaacggaaatggaaacaggcgtattttatctgcaacaaatgaactggtagcccctcttgcctatgaaataaatgagattgttgtgtcttatgagagcaggctttctactgtccggcagacagaagaaacaaaccgacagcttatgacaagtctttcccatgatgttcggacaccgcttacaacgcttattgggtatcttgacgctgcacataaaggaattgttacaggaaaagacagggacgactatatcgaaacagcccgccgcaaagctcacgatttgaaagaatatattgatgttctttttgactggttcaaattaaattctaatgagtttgctatggatataaatattgttgaagctgcggagctgacacgaaatatcttgattgactggatacccatatttgaagataagcagatagattacaatattgatattcccgaacagcctttcagggtaaaacttgatacggacggctatatgcggatattgaacaatcttattcaaaatgtaatttctcacagtcatgcggataaaatagaaataatcctgtcaaagcaggaaaaaaatatgcaaatccgattagcagataatggaatagggattgaaaaagaagatttgaagcatatttttgaacggctctataaatgcgataagggacggtctgaaaaaggcagcggtcttgggctttctatcgcacaccaacttgtagaaaagatgaacggcacaataacagcaaatagcatacagggaaaaggaacagaatttactttgctttttcccttagcaaagtaaggttctcccgtccttttgacgggagccttaattatttggggagaaatatttcaaattgcaaggttaatgcaaggttgcggcaaggttaatgcaaggttggtgtgatagaatactttacagaacaggaggtttgaatatggacaaaaattatatcattgaaacaaaaaatcttacaaaacagtacggctcacaaaagagtgttgctgacttaaatattcatgtgcagaaagggagaatttacggactgcttggaagaaacggagccggaaaaacgaccactatgaaaatgctacttggattgacaaagccaacttccggcgaagttaaaatatggggaaagtctttgcaggggaatgaaaagaaattgttgccccgtatcggtagtctgattgagtcgcccggtttttaccctaatttgactgctacggaaaacttacaaatttttgctaccttacggggagtaccaaaccgccacgcaatcaaagacgctttagatttggtgggattgccttataaagacaaaaaactgttttcccagtattctcttggtatgaaacaacggcttgcgattgcacttgctgttatgcacgacccggagcttttgattttagatgaacctatcaatgggcttgacccgattggaattgcagaggttcgttcttttattcgtgaactttgtgacgcgagaggaaaaacaattttaatttccagtcatattctttcagaaatttcgctactggctgatgatattggaattatcgaccatggcacactactggaagaagaaagtcttgcggaactggaacaaaaaagcagcaaacatatccgatttactctttctgataccgcacaggcagcaagaattttggaacgtactttccacgaaaaccatttttctatacaggacgaccacaatttacgtctacacaatcttgatttaccagtagggaaaattgtaaccgcctttgtagaaaatggattggaggtatcagaagctcatacttgtgaagaaagccttgaagattatttcaagcgtgtgacaggaggcgagggaattgcttaaactgattaaatgcgaattttacaaatttaaacgacgttctctttttgttttggctactcttgttgctttggtttttccggtagtaatgactgctttatattggaacattccaacacaagttaattatgataatttgttttccggcattgtggactatggcgattttcttcttttgttgccgatattggttgttattgcaacttctctgttctttacagaaacagataatgacactttaaagaaccttacaaccattcctattagcaaaagtaaaatagttgtagcaaaaataggagtaatggctattatttcagtagcttatactcttttaggcttttttgccagtgtgttgtgttcaaaaatccttggtattgctatggaaaacatggcacaaaaatttgtattgagtataggattgggaataatgctcctagctgcggctttaccttgtgtggcattagttgtatggttcaataaaagtgacttgatttctattgtcattacccttttttacacaattattaactatgtaattcatgtaacagatataggaatgctgacaccagtaggggtaaatataggaacaatcttacctatacctgtaatcaatcgttggatttatcaattttacgacgaggggaatggagccgcagctgaattttataacactatgcgtccttattttgtcccaactcatatatgcgtctgtattattgcgctctttctgttcgtatcaatttatgcgattataaaaatttataatcgtcgtgagatataggaggtgtgaatatgcttgcttttattacaacagaatttcaaaagctaaaaagatacagtattattttggttggtatgcttggtgtagcgtgttcccctattatttcaatcgttatgcaaaaaattatgacagatgaagctaaaaatgtcttgaattatacatttcctgatttacttaatagtacgatttggaataatatgaccatgttttttcctatgattatagctttgattggtggctatatgattaaccgagaatacactgatgatacactaaaaaatctgcaagttattcctatttcttttcctaaactgatgattgggaagctaactacaataggactactttctatacttttaggattatgtaattcatttgtcactattatagtcggaataatcgcttgtcgtgagaatatgactttatcaacaattataattgggactatacaaatttgtggaatggcattatttacatttattggagaaatgccacttatcgcacactgtggaaaaaaacaaaactctttcaaaggtggggctgttgcagcttttctattaggatatattagtatctacttcaaaaatcctattatcagaaatttgtatccgctctctgccggattaagtatagtcggctttaacggagaaggatttgtgacagatactaccggagcttattcatcttctcaaagcattttattaggtgttttaacgatgttagctatgcttatattatcattgataataatttctattccacaaaaagaaactttagctacccctttatctcaaaaaaggagaaaaacagaaaggaagattgcaaaatgaaaaagctgatacctttatttttaatgttatgttgtcttgtttctgtaactgcctgttctaaagatgaaattgtaagtaattataatcaagccttacaatctattggagataagggtttaacagatgataaagatttgcaaggaaaacgtgaatttggtatagatagctatgtaggaaattataccgctgactatgatgatttttccggtaatgaaatcattttcgggggaacagctcttgaacgagataatggaaataaaatagaaatttcttgtgatatagctgctcaaaccgggaatttgaaactaattttacaaacgggaactgatgaaccgaaaatcctttgtgatacagaaagctcatataatgatactattgaacttccgtctgcaagcaattatgttttgattgaagcagataattttacaggttcactgaaattaaaactcaaatgataatagaaaggaaaccattatgaaagaaaaaattttaagtattatatcccttgttacaatttttgtacctcttactatgttatttgtttggaagcctacggctgcaaatgcaacagctattgctattggttacggtgtttttattgttgccagttttctttacgcactattcttatttctcaaaaaacagcaacgcgatatttatgtaaaagttggattgggtgtaaatgccttttatctacttgggatattatttatggttataatcccacgtcttttctaaaatttaaaatctaaatatctgccggacgacggcaaaagaaaaaaagccgtcgcagagcagatacattttcacgcgcctttgaagcggtggctttgatttttaaagccgccgcttctttttgtctactgctacctataacataaattagcggcatttaggagggctgccgctatgggaatttctttgctgttatacagcatacataggttgcattcattaaaaaaagtacagttccaccaccgggtaagtctggttatagatatgaactgtcaaatcaattaaataccgctgttatttcctatgcgcctatctgcgttttgcaggcaggcgcattttgcattttacagaagatttttcaaaaactttgctctctttttggcaaagcaaaaagtcgcctgtattatcccgcgaaaaggggaggtactaccgcctttcggcagaaaggaggtgaacaccatgacacctaatcgcagggaatttgaaaagcaatgtgcgtttcaaaagttctgtaaatcagtgctgcacaatgaagcgtgcaacgcccatgaagaaattcgtcggcgcagagttcgggaggttactttttctgaccttgccttgcatgaggaacggcagctttataccgtcgataagtattttcaagacgaagaagcagagccgtcttatcaaatggcaggaaaagaaataaccccaaaactgctgcttgaagctatccgggctttacccgaagaacggcgcaaaattgtactgctgtattactttgagggattaactgatatagaaatcggaaagcagctcaatatctcaagaagtacggtacagtatcgccggacaagctcctttgagcagttaaaaaaatatttggaggaaaacgctgatgaatggattgaatggtaaaccgaccgagtacccggagaacacccttgtaccttatcctgtcatactggcagcgtcaaagggcgacccggacgcaatgaagattgtattgcaacatttcagcggctacatagcccgtctttccatgcgaaagctctatgatgagcgaggaaatgtttattttggagtagacgaagaaatacgcgaaaggctgcaaacaaaactgatgagggcaatcctcacatttaaggctgaataaaccaacgcggtattggagcgcttcccccttttctgttccatatcgcagaacagccctctgctctttgataaagaaagcggcgcaatagaacggcgacgcagtataaggcaaatcggatacgttccttttgtgccgagccatgcggtggatacgccatgacctttctcttaatagaaaagcgagcgagaaataccacaccgtaaagcagagatagcagcctgcgggcgataacgcacagaatacataatgatacttccttatagccatagtccgagcgttagaagcgtcgcaggcaatgggtagggcttcggcagaccgccggaggggtgcaagtcccatgaggttacgctaatagccgtccgattaaagcctatgttacagattgatttttgacccattaagaaagggggacgacaaattgaacaataacgacgtgccgatttgggaaaagtacacgcttaccatagaagaggcagcaaaatatttccgtatcggagaaagcaagctgcggaaactggcagaagaaaatcccgtcccggactgggtaatgatgaacggaaaccgtattcagattaagcgtaagcaatttgaaaaaatgattgatacggtggacgcaatctgatagtgaaatcgagccttgaatgtggtacaatatagtcaagcatatcaaggctctttccattatggaaaggagcataacgatgtcggaaaaaagacgggataataaaaatcgtattctccgcaccggagagagccagagaaaagacgggagatatgcctacaaatatatagatacctttgggaaaccgcagtttgtgtattcttggaagttagtgcctacggacaaaaccccggcaggaaagcgcgacgatatagcgttgagggaaaaagagaaagaaatccaaaaagaccttgacgacggtatcgaccatatcggaaagaaaatgacggtctgccaactctacgcaaagcagatacgccaccgggcaaatgtgcggcatggtacaaagcaggggcgaaaacagctcatgcggattttgcaggaggataaacttggagcctgccggattgaaaatgtgaagctctccgacgcaaaggaatgggcgttacgcatgaaagaaaaaggttacggcttcaagactatcaacaaccacaagcgttccttaaaggctgccttttacacagccatacaggacgattgtattcgtaaaaatccatttgacttccagttgaacacagtccttgaagatgatacggaaccaaaggaacctctatcccctacgcaggaagcggcttttctgtcctttgtgcagcatgataaagtctatcagaaatactacgacgagattatcatactgttagggacagggcttcgcatttcggaactctgcggactgacggaagctgacattgacttaggcaaacagcttatcaatgtagaccaccaacttttgaagattgcagacgtgggctactatgtggaaacgcctaagacgaaaagcggcaaccgggttattcctatgagtgaaaaagtgttagaagcatttcagcgggtgctgaacaagcggaaatatgcacagcctgttattttagaaggctacacaaagtttctgttccttaaccggaacggtttgccaaaagtggcagtcaactatgaaagtatgttccgggggcttgtaaggaaatacaacaaaacgcaaaaggtagcattgccaaaggtaatgacaccgcacaccttacgccacacattctgcaccacgttagcaaatgcaggaatgaacccaaaggcattgcagtacatcatgggacattccaacatcaatatgacgctgaactattacgcgcatacgacttccgaaacgtcgataacagaaatgaagcggctgattgcctaagtagtaaacggagaatttactactccacctactacttttgaacaccaaaacatacggggatataagaagatttgagagtatcttccacaatgaaaaatgccggaaaagcctgtaacaataggctataccggcatataagaacttttgaaaagataatcaaaaattactttgtgatttataaaaaacagtgctccttttagcggcagggaaccttccggtttgttcagattcgtttccttatccacttttccaagcaatacaccaaccggatccatcgttggtttatctgatacttttaatatacttgtttctcctgacttaacagttatcgtataagtggttttatcaagtgcatagccttttggtgctgttacttcttttacataataggttcctgcagttaatgtcagtgtattggagtcaccatttgcatctgttgtaagggttccaactttggaagctccggaaagtgatttctcactatatacaccatagactgcatctttcagtgaatagcaggcatttccattggttatagatgtatcagaactggatttttttagctttgcataaccggatggattgtatgtaccagaccaggaagataacggttgtccgttcccctgatagatcacacctttcgcatccgtaaaatacttataattttcccatgaccatactaaaccgttttgataatattcactcttatgaccggacatccagctaccacaggcacacttcaccccatttcctgtttcaatctgtactccatccgcaaaccatccatgcactgcattaagtacccaccagactgcacattgcttcataagatactcgtaatcactattgattgatttacacatgtaatggtcatagtaatacatcattgcagctactgtctgaatcgtttctttattatagatggtagatgcatccacgcctgttttttttcctgctttgaaactatccataggatctgcacagaaaagtggttcctttgtatctgtatttcctagcagtccttccctccatgtcaataattgtggccaggaaggatcattatagttaatcacatcgattcgaccaatgctattgctttttattctacctgtattaatcacatcaccggcagctcttgcagctttcgctcttcttggcatactcgatgtattggcttgagcatctgattccgcaaacccaactccaatttcttttaagagctgcttcatttgacgttcaatctctaaatccttctcaacatctttctctggttctttatctccatcggtagcatcttgctgttctgctacaccacttgatggatctgcaatcgtctcactttgaaccttatctgattcaggattctcttcggcagataccatgttaaaagaaaaggacgttatcaatacaagtgctgtcaatagaactgccaagactcggcctctctttttccttttttgtttcatctgatttttctttccctcctaatttctaagttaagctgttattgctcctccttccatgaaagttaaaatcaagctttttctttccatggcggagccctggaacgtcttcgaattctcatttttcttcctctttctcttaaaattgagtacaaaaaaagaaccacgttttgtgattctctttcgtgtaccgaatttcggtacatttttattttcttgctccgcaggaacaaacatatccatcaacaacagtttcatcgtatgccacactgtcctgtacccagcgtgttccatagactgcctcatgatgtaccgttgttgtaactggacgtgtaccatactctatatgatgtccaccaccctcatacgctaatgcatgtgctttttcatgttcaattacattatttgtaatatcagctccacacacattgcagcaatcccatgcataatcctcataggtagtcacttgctcatcccatgcttcctgctcaacatactgctcattgtgtccggtagcttcatgatgtacaacatgtgtctgtgctacataattatgctgatgcactgattctgtcttattagaattctctttattacttccactgtttgttgcaggttttgtaggagtagacgctgatgcggaaggctttgttgtttcctgctttttattagaagtagatggattcgttttatttgatgtctctttcttcttcgagtcagtttttgagtcattcttcttggaatcattttggactgtattttcctgcttagaagtatctttctttgcatcattcttcttagagtcttccttcttagcatcctctttcttaatagtctctttttcaaaagattcctgttccatctcaaccgtctcttcttttttctggttatttattaaatcatctgacttcttttcttctgttgctattgatgcttttttatctactgttttagttgcattactctctccacacccaacaaaaacaatggttgctgtcataatcagaaacaatactcttcttaattttcttctcatatctattctcctaattatattatatcaaacccttttttactcatctaggttactttaggtacacttttttccgtaaattattgatttacaaataaactgaacacttggactgttcagatttattttgtaagttctattttttacggatagaattgaacatctttccagttgtttgattaatatagacgcttgttacaatgaatattctgcttatattatccggcatctatttcattcgattgatatccataccaatcatgctgtacttcctgctgataaaaatgatttatcgttgctggtgcattatacaatgctgtaatcatatatgcttttatgtttgctattttcgtagttgtcttcttcatacaataaatcacatattccaaatggctactattcagctttaaaaagcgcgacttcactaactcatacggataatcttctcctgcaattttcacagttttacgtttcacgcaaacaacatcacatatgatttgaaataattcatcataaattttacgatcattattttgatcatactccatatgaaaatcataggagagattttctttaatcaaatttatgtattcctgggtatcatccacctcatcaatcacatcactatttgattccgctatttctgattgattgatataattcacattaatataattcttattagtataattagagtcggtttttccgacctcttggagtcggttttcccgacctcctgaagccggtttttccgacttcttgaattcagtttttccgacttcttgaagttcgattttctgacttcttgaattcggtttttccgacctcttgaattcggtttttccgacttcttgaagttcgattttctgacttcttgaattcggtttttctgacttcttgaagtcggtttttccgacttcagtgattttatcagggtttgcgggctctttttcctcattttcaacagataatgttgtaaaattcttaacataaattatatctggtttgccaagtcctctacggattttctctactaatccaataccttttactgaatctaattctgctaagactttaactgctttttccttactacatcccaaatcttccttaatgctatcaatggtataaataatataagctcgattcatttcgtcaatccacttatttttcatagacatcgacatacgatcaagcataagaccatatagtaacttggcatcgcttgataattgcttaaatctttcatcctttataagcagacgtggaacacgataaaatgaaaattgctctgcttctattccataataataatcaagttgtaacatttccctcatcccctcctactatgtatccatagaatcttttttttgcgattccatgcttttttcgaaatcatatgtacattttttgtcacgccaatttatagattctttgcacaaacacaaaagaattaccaaacttgccaagaatatcaatgctatcacaaccaagacaaccttgttcataaaacaccttccttccgtaccgaatttcggtacatttctactggtgacagaaaccatacagatttctgtcaccaccaaccatacatacgtacatatacacggcaattgcatcgtatacatgtacagtccaccttgtgtcttcgaaaccacggacttcaccgatttatacagcaattccgcaaggtggtatgttctatttttcctcattatgattgcattgttcagtaatactctgatttgtatccattaataatttaaccccttcaaacagtgcactaccatacaccactatctgaataatcagcccccaccatacgtccggcagacaatctgccagactccccaggattaacaatccaataaatatcaataatttttttactaatcttcttgttttcttattcatctctctactctttcactgaatcctttatcatctccaaattcaataaagaataccctttctctattccggattcttgctcatttatatatgtaattgtaaacatagctgcttttgtattgtatccctgttggttaactgcatagatttctatctcttctgattcccgaaatctgttgtcttttatgaaaacacatttttgtttccctgcaatcaatcgtagatagatctcataggatacttttaggcatttctgctcaccctttatgttttccttattttttctatcttgtacgactatctgatttacagataccactttatccaacaattttgaaaaacaattccaagtaagttctttctcgttgattgtaatttttttcggtgtgcaatcaatattgattctgtctgaatgcacactgatatacgattttccatacttttcaatcatttttctacaagttttcttccgatctaaatcgtcaatttcttttatgccaagcacctcatatgctgtaataatttcgttcgtggtcggatttaagaactcttccttatagctttttaactccttatcagttttgcatcctctggataatgcctgaatctgattttcttcagacatactggctaaagttaccgctgctgatttgtctatttcacctttttcaaactcattcattgccatatctcctaaatttttagaaatcgtaaggtactctccaaccgtagatctgctgagattatatttttttgcaagccgttccaccattcgtccaccctgtatttccgggaactcttccggataattatttatcaaatattgcatccgctccaacttatgcataatctcataaggagtctcctcgtgatggcagttactactgtagatttgaaattcggcttgtacctcactgatattctgttcaaaacatggcagaaattcgaattcttttttatctcgttcttccaccaataacttacaggctgcatgtcttttatgtccggctatgattttatacgcatcagtatctattttttttactaacagatcctgcagaaccatgccatctgcttcaatgagatctgcaagtccttcaatttcttccttatctttcgcatcacaatattgtttttcgttttttgcaagttttgtataatgaatccattttgtaattctttttggatgtgttgtcttttttacttcttcttttgcaaatacatttgatattttagccatgatatcccctccgtcctatgcttccagcagttcctttgccagttctaggtaatcctgcgctaccgtactattttttctgtgtttcaacacaggtttgtatagatttagtgcgttatctacaacagcggaacgactgatgcaggtgtccatgattggataatcatgttttccaagcaaatctatcattgcatctttctgtgctctaccatttgcaaccatattggcaaatattttccactccatcttctcatctgcatactcatttacaaagctctctacaagtgccagattatcccggcaataattatcaaacttaattggagttaacataatatctgcaacatgaattgcatttcttgttaagcagtcgaaaactggtctggtatctataatgcaataatcatattcctttttaagactttcaaatgcatttttcagtttgtattcttctgtgtcattttccttggctaatcctctgataatatcaatatttttgtattttgttcgataaatacattgatttatcgattttggatttgcaagtacattctgcaccgttttccctgtacaattcactttcgtaaaaaatctagtactattacactgtggatccaaatctattaacaataccttttttcccagtgacatgaagctgtatgctaagttgacggacgttgtactttttcctactccaccttttaatgtcgcaattgctatagttttcatttttttctccttttccgtaccgaatttaggtacatttgtatgtgttggttggtttattataaatattttttattttgcaagacttatttgttgcttcttaactttttcttcaaaatattgatccatgatattattttctagtgttgttatcttatcaaaatcatctgtatcacaccgaactcgaatcgtatatcgtccccacgctttatccaaggttatctgtacacgataatattcgtcatttatgaaatcaagccaataggttccttgatactgagtgaatgcaatgtctttcattttcggtaattcatattcacagtaatccttggcaagttttataaagcttttctttcctacatgatatgttttagccgttcgtaaatcttttgccattctttttgtcagttctttactaagttcttccatagccacttccccttcctacaattttataatccgatatctgacaatgttatttgctcatattcctctttcttctctttcttttttctttcgttagtaatattatttctcctcatccttactatttgtgcatttgtcaaatcactttcataaagcctttgaatttcatcgattgcttgttttcgcttttcctcaaatatcctatgatttaagcccatctcctcttctacttgtctatataaatctccttttacatataatcggtaaataatgttgtatccttctccggttaaagattgaaagcataaatataaacgatgtactccttccgcatcagctgtaagtataagtatctctgctgtaagttccttttctctgttccttaccattttctgatatttcaaatacacatctgctagatcttttttaacacccccttttcctctggctgaaaaatctatatgaggataagctgctacttctatggattgtttcttcacctcctcaatcttcttctgtatatcaattatttgataatgcaattgttgtgtaagttcattatgatgtctaagtacttctttgattttttcactatctactttcatcacattagtttcttctgacatctgagccttcccttcttgctgtaccgaaattcggtacactcttatttctataaatggcttctcgtaaaacactactaatttttataacaaaaaaaggactaattccttttaagctatagctttaaggatttagtcctaatcgagggtataaagaaagggaagcattgcgcttccctttcgagttatatatagattttacaaacaatatctttaaatctgttcgctttagtatactcaggatgatgtttcatgtattcattcacatctttccttgtaacgattagcgttgtgaagtaaaaatatctttgctcatctattattttcctactttggcaattgctgcctgtgctgctgcaagacgagcgatcggtacacggaatggtgagcaggatacataatcaagtccgatgctgtcgcagaactctacggagcttggatctccaccgtgctctccacagatacctacatgcaggcttgggttaaccggttttccgagttcgatagccatcttcatgagcttgccaacaccaacctgatccagttttgcaaatggatcgttctcgaagatcttagcatcatagtaagcatcgaggaacttaccagcgtcatcacgggagaatccgtatgtcatctgtgtaaggtcgtttgttccgaagcagaagaagtcagcttcttttgcgatatcgtcagctgtaagagcagctcttgggatctcgatcattgtaccaacctcgtactcaaggtcgcttccagctgctgcgatctcagcgtcagctgtctctacaacgaatttcttaacgtatttgagctctttgatatctccaacgagtgggatcatgatctcaggttttacgttccaatccggatgagctttctttacattgattgctgcacggataacagcgcttgtctgcatcttagcaatctctgggtatgtaactgcaagacggcatccacggtgtcccatcattgggttgaactcgtgcaggctgtcgataatagctttgatctggtcaactgttttgccctgagcatcagccagtttcttgatgtcctcttcctctgtaggaacgaactcatgaagcggtgggtcaaggaaacgaattgtaaccgggttaccttcaagagcttcgtaaagtttctcgaagtctccctgctgctctggaagaatcttagcaagtgctgcttctctttcttctactgtctctgcacagatcatctcacggaatgcgtcgattctgttgccttcgaagaacatatgctctgtacggcaaagtccgataccttctgcaccaagctcacgagctttcttagcgtcagccggtgtatcagcgtttgtacgaaccttcatagttctgtacttgtcagcccatcccatgattcttccgaactcaccagcgattgtagcgtctacagtcgggatgattccgtcatagatagcacctgtggatccatcaagtgagatgctgtctccctcgtggaattcttttccgccaagtgtaaatttcttattagcttcgtccattgtgatgtcaccacaaccagatacacagcatgtacccattccacgagcaacaacggctgcgtgagatgtcataccaccacgaactgtcagaataccctgagcagacttcatacctgtgatatcttctggtgatgtctcaagacgtacaagaataactttctctcctcttgcagcccactctacagcgtcatcagctgtgaatacgatcttaccacaagcagctcctggtgatgctccaagtgcttttgccattggtgtagcagctttcagagctttcgcatcgaactgtgggtgaagcagggaatcaaggttacgagggtcgatcattgcaacagcctcttcctctgttctcattccttcatctacaagatcacaagcgatcttaagagcagcctgagctgttctcttaccattacgtgtctgaagcatgtacagtttaccgtgctctacagtgaactccatgtcctgcatatctctgtagtgtgtctccagagtgttgcaaacttctttgaactgtgtaaatgcttctgggaacttctgctccatctcggaaatgtgcattggtgtacgaacaccggcaacaacgtcctctccctgagcgtttgtcaggaactctccgaacagaccattctctcctgtagcagggtcacgtgtgaaagcaacacctgtaccacagtcatctcccatattaccaaatgccatcatctgtacgttgacagctgttccccatgaataagggatgtcattgtcacggcggtatacgttagctcttgggttatcccatgaacggaatacagccttaacagcttccataagctgtaccttaggatctgtcgggaagtcttctccgatcttctctttgtactcagccttgaactgctcagcaagtttcttaagatcatcagcgtcaagatctacatcctgtttaacacctttctcttctttcatcttgtcgatcagttcctcgaagtatttcttaccaacttccataactacatcagagaacatctggatgaatcttctgtagcagtcccaagcccaacgtgggttgcctgaagcttttgccagtgtctcaacaacctcttcgttaagtccaaggttaagaattgtatccatcataccaggcatagaagctctagctcctgaacgtacggaaacgagaagcgggttctctttatctccgaatttcttacctgtaattccttccatcttatcgatagcttccatgatctgagccataatctcatcgttgatctgtctgccatcctcatagtactgtgtacaagcctctgttgttactgtgaatccctgtggtacaggaagacccagatttgtcatctctgccaggtttgcgccttttccaccgagaaggtttctcatatctgcgttaccttcagtgaacatataaacccattttgccatgatcaatgacctcctaaaataatttttacaaataaaataattttatttcgcatataatattttaatggttttatacttatgagtcaagtcttttgtccgtaattatatacaatttttacaaatgctttttgtatacttttcatattggttaacctatctttcacaaattgtaaacacattgtccatcaggctgtcattttgcatatttgcattaatctccatacaatgtgcaacatgcacaaaaaaatagttgtccatgctttataagaacttggaaacaactattttttttgtgattaatatacaatttacacatatcattgctatggtgtttccgccaccaacatcatgcaattttcctcaaaatcaacaagtacgtaatctttatctcatttcttcaataaatgccttatatcccttataagcttcatacacatctgccttgcttgtcacttcccacggcgcatgcatactcaacactgcgacaccgctgtcgatgacttccatgccataatttgccataatgtaagcgattgttccaccaccgccggcatctacttttccaagttctgcgaactggtatgcaacactctgcgcatccattgcatttctgatctttgcaagatattctgcatttgcgtcattagaaccgctctttccacgagcacctgtaaacttgttgaatacaagtccctttccaaagaatgcagaactgcgtttttcgaatacttcagcatacatcggatcataagctgcgctcacatcagaagaaagcattctggaattcatcagcgctcttctgactttcaggtcagactccccttctgtcagtgctacaagttctgcaactgtattttcaaagaaacgagaatgcattccggtcgcgccaacacttccgatttcctctttatctacaagaatacagcatgctgtgtgctctacttcttccacatcgagcatcgcaaaaagggatgtaaatgcacacacacgatcatcttgtccgtaagcaagcaccatactgcgatccaatccgcagtcacgagcctttcctgccggaacgatctcaagctctgcggagaggaaatcctcttcctccatgtcataatattgtttcagaagattgattacatttgcttttacagcctctttttccttttcttctaatgtctcatcctgctcaatcggtcggcttccgatcagaagatcaagcttctctccttctacaaccgttgcagcctttttctccatctgtttcgacgcgagatggatcagcaaatccgtgataacaaagaccggatcatcttctttttcaccgatgctcacctgaactgttgtaccatctttctttgcgatcactccatgaagggcaagtggaagtgtcacccactgatatttcttgattccaccataataatgtgtatcaagataagcaaactcttcattctcatacaatggattctgttttacgtcaatgcgcggggaatcgatatgagctccaagaatattcataccttctgtcaacggttttgtacccatatgaaacagcgcaatcgtcttgttcatacacacggcatacagtttatctccggctttcacctctccaccgtttttaatgatatctctgatatccttatatccctctgcttttgccttttcaactgccagtgcaacacactcgcgctctgtcttaccggcatcaaggcagttcttgtattctgtattcacctgttctaatctgtccagctcttccttactgtaagttgtccatgcattttttctgtccatgtcattctcctcctgttctatcttccatgctattttaaagttataaagaaacagcccaaactgaatccacaagcttacctgtgaactacagtccgggcttttcttatttatcttaccactcgaatttcttctcgaagtatgctttcagatcttcaatcttaactctttcctgttccattgtgtcacggtcacgtactgtaacagctccgtcttcctcagaatcgaagtcatatgttacacagaatggagtaccgatctcgtcctgacgacggtaacgttttccgatatttccacgatcatcgaactcacagttgtaatacttggataactctgcaaatactttctctgcgccttcgttcagtttcttggaaagtgggagcacaccgatcttaaccggagccagtgccggatggaaatgaagtacagttctcatatccggtttctcttctgttccgatattctcctcatcatatgcactgcaaaggaatgcaagtacaacacggtcagcaccaagtgatggctcgataacgtatggaatgtatttctcctttgtctcatcatcaaagtatgtcatatcctgtccggatacattctgatgctgagtcaggtcataatccgtacggtcagcgattccccacagctcgccccatccgaatgggaaaaggaactcaacgtctgtagtagccttactgtagaaggaaagctcttcctgatcatggtcacggtaacgtacttcctcatctttcagtccaagagatgacagccagttcaggcagaagctcttccagtaatcaaaccactcaaggtctgtgtctggtttgcagaagaactcaagctccatctgctcgaactctcttgtacggaatgtaaagttacccggtgtgatctcgttacggaaagacttaccgatctgtccgataccgaatggaagtttctttctggatgtacgctgtacattcttgaagtttacaaagataccctgtgctgtctcaggacgaaggtatactgtgttcttcgcatcctctgtaacaccctggaatgtcttgaacatcaggttgaactgacggatatctgtaaaatcatgctttccacaagtcggacatggaatgttattatcctcgataaatgctgccatctgctcctgtgtccatccgtctacagagctctcaagctcgattccattctctgctgcataatcttcaataatcttatctgcacggaaacgctcatgacactgtttacagtccatcagcggatcactgaatcctccaagatgtccggaagcaacccatgtctgtgggttcataaggattgcacagtcaactccaacattgtatggattctcctgaatgaacttcttccaccatgctctcttcacattattcttaagttcaacaccaagattaccataatcccatgtgttggcaagtccgccgtagatctcagaacccggatatacgaatcctcttgactttgcaagtgctacgatcttgtccattgtcttttcaaccattgtatgttcctcacattcttttttatcatttacattattcacataacttatgcactccggttgatcttttcacagaagttattcacatcttcctttaaagatattcccctttgtacatcaatgtttcttattataacgactaatgccttatttttcaagctgttttaggtacttctctttatgtttctgcttatattcatacataacttcatccgctctttgcaaaatctcatctgtagaaacaatatcatgtctttcaatagtattcacaacagcgtttccaggatctccaaagacttaaattccttatctacatacatcttcatcaaccgtcccatcacgcgtccaaacttctccagcacttccggcttcacgttaaatgtatataatttctcaattgtactggattcaatatactgcatcgtatacagcgtagaaccgtcaagaaacattccgtctctcacttctccgtcacattcattacacacaagtccgcccttcgccgcgctgaacactgccggcctcgtccggtcgccacactgtacacactggaacacctgcggtccctgtccgttgattgtcagcactttcaactcgaaaatgtaacggatcaactgattcggaagatgtggatttgtcagcgcacgcatcgtctgataaagtaatttcaaaagttcccgctcatcattccgttccctcgcatagtaattcgcaacctcaaggaaataaaagccataatatgcacctaccacatcttctctcaattccgaaaaataattggatacatttacagactgaattgtgtaggaagaacgaccttcatacatcgtgaattcaccgaaagtaaatggattcaccgctcccactagaggactgtttggtcttcttgatccctttgcaaaggctgagatcttcccttgttcttttgtaagtatgacaactctgcggtcgtactcgcccaccggtgcgacagaaagcaccattcctgtcaaaacgatctgattcacgatgaaattcaccttctttctgctatatttgtaaagatgttggagacaaaacccacaactacgatgcctgcggatgcttcgtgcaacgcatttccaatatcttctaatatatccgatttcgcgtgtaaatacaaggagctgttctagggggattttttttggatatgagttttgctggatatttgacacatgttaagattttggaaaacccgaccaagagaaacttgctataaatcatctatttaaccttgattccctgaatctgcttttcaattattcccatatcatattcttcagcgtattagcgacttacgtcgctagatatgctaaaaagcggcagccaccaacctctcagtcagcatctgccgctctcatcattctctttttattctttatcctcaaaggcttctttcatcttatccatgaatccttttttcttgccctttttctctgatttctcagattttgtagcaagattgtcatgctgatgaagtgtatttccactgagctcatcgaattttctcagagcctctttcgcctctgcgcttaatctctccggtgtctggatcactaatgttacataatgatctcctcttacctgagtatttctaagggatggaactccctttcctttcagacgtacttttgtatctgtctttgttcccggttttactgtgtagagaacgtctccgtctacagttggaatcttcacatcgccaccgagtgtagccactgcgaaggaaatcgcaacggttgagaagatatgcatatcctgtctctggaagattggatgtctggatacgttaacctcaacgagaagatctcctctcggtcctccattaactcccggttctcctttttcacgaatgcgtacgctctgtccgttatcaatacctgccggaatcgtaactttgatcttctttctgctggatgtatatcctgtacctgcacatttcggacatttctctttcacgatcttaccggaaccaccacagttcggacatgtttgtacattctgtacggttccaaagaaggactgggatgtatatacgacctgacctttaccaccgcactttggacatgtctccggtgatgttccaggctttgcacctgtgccgtgacagtcttcgcaaggatctttcagtacaagatccagttctttctcgcatccgaagacagcttcctcgaatgtgatgcggatgctctttctgatattagcccctttcataggaccattgcttgcgccgcctcttctggagccaccgaacatatctccgaagatatctccgaaaatgtcgctgaaatctgctccattgaaattaaatccgccaccgaatccacctgctccgccgccggcaccaccatcaaatgcagcgtggccgaactgatcatactgacgacgtttgtcagcgtcactcagaacggcataggcttcggaagcctctttgaactttatttctgcttctttatcccctggattcatatctggatggtacttcttcgcaagctggcggtatgctttcttgattgtagcatcatctgcatctttgcttacgccgagcacctcataataatctctctttgcctctgccataacacaaatactaacctttctgtatctctttcttaacctcaagaaattctacgaagctacaaagctccgtagaatttctcttcatgcttcatttatctgatgccctgctgcctgtttctcttctgtcttaccggcatcttttctatattttagacttctttgtaatctccgtctacaacatcatcaccctggaaaccatccggagccggaccagcttctggtgtaggaccagcctgtgcacctgcacctgctgcagcacctgcctgctcatacatctttgtgaacagtttctgtgcgctctccatcagtttttccttcgcagctttgatctctgctacctgctcttctgttgtgttctccggagcagattttgcaaggatatctttcagtgcctgaacgtcagcctctacagctgccttctctgtagcatcgactttgtcgccaacctctttgattgccttctctgtctggaataccatagcgtctgcttcgtttcttgtatcgattgcttctttacgtttcttatcctgagcctcgaattcagctgcttcttttacagctttatcgatatcgtcatcagacatattagaacctgctgtgattgtaatatgctgctctttacctgttccaagatccttagcagatacatttacgataccatttgcatcgatatcgaatgtaacttcgatctgcgggattccacgtggagccggcgggattccatcaagtctgaactgtccgagggacttgttgtctcttgcgaactgtctctcaccctgtacaacgttgatgtctacagctgtctggttatctgctgctgttgagaagatctggctcttctttgtcgggattgttgtatttctctcaatcagtcttgtagctacaccacccattgtctcgatagacagtgacagtggagttacatcaagaagaaggatgtctcctgcgcctgcatctcctgcaagtttaccaccctgtacggaagcaccaagtgctacacactcatctgggttaagggatttgctaggctctttgcctgtcagtctcttaacttcttcctgaacagccggaatacgtgttgatccaccaacgagaagtacctgtccaagctcggaagctgtgattcctgcgtcagaaagtgcacgtcttaccggttcctgagtcttttctacgaggtctcttgtcagctcgtcgaatttagctcttgtaaggttcatatcgaaatgcttcggtccttcagctgttgctgtgatgaacggaaggttaatatttgttgttgttgcacttgaaagctctttctttgctttctctgcagcttctcttaatctctgaagagccatcttatctgcagaaagatctacgccttcttttgccttgaagtctgcaagcatgtaatctgtgatcttctggtcgaagtcatctccaccaagtctgttgttaccggctgttgaaagtacttcgataactccatcaccaatctcgataacagatacgtcgaatgtaccaccaccaaggtcgtaaaccataatcttctgctctttctcgttgtcaagaccataagcaagtgcagctgctgtaggctcgttgatgatacgttttacatcaagtcctgcgatcttacctgcatcttttgtagcctgacgctgagcatcgttgaagtaagccggaactgtgataacagcttctgttactttctcaccaaggtatccttctgcgtctgctttcagtttctgaaggatcattgcagaaatctcctgtggagaatatttcttatcgtcaatatctactttataatctgttcccatctctcttttgatggatgagattgttcttgctgcgtttgttacagcctgacgttttgcaggttcacctacgagacgctctcctgtctttgtaaatgctacaacagacggtgttgttcttgcgccttctgtattcgcgataactgttggctgtccaccttccataacggctacacagctgtttgttgtaccaaggtcaataccaataatttttcccatgataaatttcctcctctatctaatctctgaatcttgttaaaaatcaaattagtttgctacttttaccatgctgtgtcttacaacactttcacggtacatgtaacctttctggaattcttctgcgatgatgttctcaccgagtccctcatcttctacatgcatcactgcgttgtggaaatccggattgaattcctgaccaactgcctcgattggttttactccaacggattccagtgtagtcataagctgtttgtagatcttctccattccttctacgaacggagcattcttctcctcctccggtacggaaccaagtccacgctcgaagttgtctacaaccggaagaatcttttctatgatatctttcgctccgatctcgtacatctgggatttctccttctcagatctcttgcggaagttatcaaactctgccatctgacgagtaacgcggtctgtgagttcctcgatcttctcgtctttcttgtccttcttctctttctttccgaagaactttttcttaccttctgatgctgcttctgaatctccttcagtctcagttgcttcctctgttgcttctttcgcttcagcctcaactccctgggcatcttctgtttctactgtctcttcagcttctgcctgctcttttgcagcctttgcttttgcctcttcaacagcttcttttaccatatcttctttgctcatgttctctgtcaccagctttctaccttcctattattactctttgggttctttattataaatcgcatccaactcactttgcagcgttttcagcgtcttcatgacatgttcataatccattctcttcggaccgatgattccaatcgttcctttcataccttctcccagctcatatgtggcggtaacaacactgcagtctttcatggtcttaaccggagtttcatctccgatataaacctgtatgccgttgttctcctcacttgccagtgtctctgtcaccagatctgccagctgctgtttctcttcaaatgcactgatgatctcctgtgcgctctgcttatcactaagctccggatatttgaaaatattcgttgcgccgcttgtgtagatctccatgtcattatctacatgaatgatctctgccactgcatccagtacatgaccgacaacttcgctgtggataccagcctgttctttcaatctggcaatcagacctaatgtaatttgatcaatggataatccattcagtgtcgtgttcagaagcatattcagcttcaacagattctcgttacttaaggtttctccaacttcaatgatcttattcttgatcacattaccaccaagtacgatgactgctacgatctgttcttcatccacctgtgatagctgaatgaacttcaatgtgttccggctgttgaccggtgcggaaaccatcgttgcataattggtgttcgaagcaagaacctttgctgcctgctggagtaccttctcgaccttatcggtcttctcaagaagtgcatcctctcgtctgctgatctcctgctccttattctccatcagaagatctacataaaagcgatatcccttatctgatggaattcttcctgccgatgtgtgtggctggaagatgtaaccaagatcttccagatctgccatctcattccttatcgttgcggaacttaatttcaaatctgtgtattttgaaagggttcgtgatccgaccggttcgccagtctccagataattctgtatgatggctttcaatatcgtaagttttctttcacttaattcagcttctacagacatctctgtgttcccctttctgttcatctttgtttgttattagcactctttgtttttgagtgctaacaccttacagatactaagatagcacctcgatttctgtttgtcaacactgattgttatttttataagttttttattttcttcttattttattaataggatgctttttggggagggaatgtgattttatagaaatgttgttgacttggattgtaattttgtgaattccgggcaagcttataaccaaatcataagttgacttgaattatgatacataaaatccaggtcaaagacaagtttatttaacttacactaattgacctggattttaaaacctgctatctatactatcccctgatctgtccgtttccgaagataatatactttgttgttgtcaatgcttcgagtcccatcgggcctcttgcatgaagcttctgtgtgctgattccgatctctgcaccgaatccgaattcgaatccatctgtaaatcttgttgatgcatttacataaaccgctgccgcatcgatctcatcctggaatctcaatgcattatcgtaatcctttgtaataatggattcagaatgtcctgtattatatgtattgatatgtgtgattgcctcatcgatggaatcaacaatctttacagaaataattgcatccaggtactctgttccccagtcttcttctgttgccggaataatctctgaactgattgcctgtgctctctcatctccacgtatctctacaccatgttccttcagtcttgttacaatcttcggcaaagctgcatctgctatcttggaatgaatcacaagtgactcacatgcattgcacacaccaagacgctgtgtcttcgcattttcgataatgtctgttgccatcttaatgtctgctgtctcatcaacatatacatgacagtttccggttcctgtctcgattaccggaaccgtactgtttgcgacaacatttgcaataagtcctgctccacctcttggaatcagaacatcaatccagccatgcatcttcatcatctcatttacaacttctctgcttgtatcttccacaagaagaatgaggtcctgagataacttctctttgcggagtccttccttgattgcacgggtaattgcctgattggaatgaatcgcatcacttcctccgcgaagaattaccgcatttccagtcttgaagcaaaggccgaatgcatctgctgtcacattcggtctggattcatagataattccgacaacgccaagcggtacgcgtttctgtccgatacgaagcccgttcggtcttgtcttcatgccaagcacttctccgatgggatcatcaagtgctgcaatctgacgcagaccttctgccatgtcttcaattcgctgttccgtcagtgccaatcgatcaatcaaagactgcttcacgcctttcgctttcgcagcttcaatatcctttgcattctcctgtaaaatcaattctctctcttctacaagttcattcgctactgcgagaagccctctgttctttgccttcgttccaagctttgctgcctgacgggatgcactctttgcaagtcttccaagcatctgcatgtatgtctccatttctgttactcctttcatccgcatgtctctgtcagtttgtttctgtaaatctgtttctatctgtttctgttatgtcatttcttagctatgtcgagagtataccacataccttttcttttttctatattatatcagtatttcgctttatctttttcacgtattaacgtattagtgcatttctatgaaaacaaacatcagatgtttattccgatgtttgttttcttattctataatatttttcatccagatatctcttaagaatccgccatatttttccttcgtaagcatcttctgatacccctgtttcatgacatttgatctgctgaaaacattttccggatgcaccgtacaaagcaggtagcgatatcctatctgtctcaaatcaccttccgcgtgctgcatcattttatattgtaaatagtgccctcgaaactctggtaatacagccgccgtatccatcatagcacaaagcttcaatttctcttcctccattccaagatcatatcccagattatccgggtgagcgcccggtaaaattacgaaaaacatagctcccgccttgccctcttcatcaacagcaagatataaaagacctcgttccttcttcatccagaaatcaaattcttcatacgtttctgcaacaaaccattctggaacgttcatcccctggtctaccttattcacaatttcgtacgcttctcgtaagcactctcttcctacgcgaattatctttatcatcaataaatcttcctattttgtaatcacttctgttcatttatgtctaatgcttatacactaaaattatttttacagttcttgtagtcctgcaaaaaacaattcataagggtcatcctctcctgtaagcaccggtgaattctctccgccaccattcgtactgcgcttcattgcggcataaaattcatctcctgcctgcacaatatccatcggataaagttcataacccgtctcacgacatacagagcagaatcctccaagaggatcttctgcatcccttgtctttatgaactgttctcttaatttatcatcatgtcttgctttgcgctgtaattcatctaaagcttctactgcgttcatctctttctcctcattctgctctgtttcacctggtatttgtttcatgtttagaaaagctaccgactacaatatacaactccattcgttgttatcgtagtcgatagctttctcttttcacttttattcaatttctgtagttgtcttctggattcaaatcactcaactaagtacttgtttcttactcaaaccccaagtctaacgcccagaaattcctctgtaaatcttctccgctgtcatcggcagttctctaataatcacgcctgtcgcgttctgaattgcattgctgattgccggtgatggtgtattgattacgatttctccgatagacttcgctccgaacggtcctgtcggctcgtagctgctctcgaactctacgcggattgttccaacatcaagacgagtcgggatcttatactgcatcagggaattgctgaagttctttcccttctcattatatacaacatcttcatacagtgccataccgattccctgtgcgattccgccttccacctgtacacgcgcaaggttcggatttataactgttccgcagtctacgactgctacgtaatcgatcagttcaagtacacctgtctctttgtcgatctcaacttctgccataccaaccatgaatggcggtggagataccggtgaggaaaatgcttcacttgcggaaagtggtgcgttgctgaagcacattacattatttccaatctgacttcttgaaatctgctttcctgttgccagctctgttacatattctccatcgaaatctacatcttccggcttgcatccgagatactctgctccacgctcgcagattttcttgcgaagggattcacaagtcttaacaacagcctgtcctgttacataagttgtactggatgcgtatgaaccacagtcgtatggagagatgtctgtatctactccgaatacaacaacttcttccggtttacattcaagacactctgctgccatctgggcaaggatcgtatcgcatcctgttcccatatcagtagctccaatgatcagactgtagaatccgtcatcatttactttgatttcaaccgcacctgtatctactgctgagattccagatccctgcatggacattgcaactccgacactgcggacttttccatttcccatatcacggtatggatacttttcatcccagttgatcatttcttttgctctggcaagacatctgtcgagtgtacagctgtttgtaacttcgccataataagccggcatcttatcgccctggcgtaccatgttcttctcacgaagcactgttggatccattccgagaactcctgcaagttcatttacagctgattctacagcgaactgtccctgtgttgctccgtatccacggtaagctccagctgacattacatttgtgtaaacaacgtcatatgtaaagcggaatgcctctgcctttccataaagcggaatagacttgtgaccggaaagacctacggttgtcggtccgtgctcaccaaatgctccagtgttggaaagtgtatagagatcgattgctttaatatttccttctttatccgctcccagacgtacatgaagttccatctcatgacgcggtgaagaagcgatcaaagactcttctcttgtgtaaatgatcttcgccggttttcctgtcttccatgtgacaagtgccggataaacttcggaaactacagtctgcttcgcaccgaatcctccaccgattctcggcttgatcacacgtactttgctcttcggaatatcgagtgcatgagcaaggattcttcttgcatggaacggaacctgtgtagatgaaacgacatttaatcttccgtatgcatctaaatatgtataagtacggaaagtctccatcatcgcctgctggttcgcctttgtgtgataaacgcggtcgatcacgtgatcgcattttgcaagaactgcctctacgtctccgtcttcactcaccccatgtgcacaaagatttctcttgttgtccgcgccaaccgggcagaggcttctccagttatcttccggatgcacaaggattggattatcctttgctgtacggaaatcaagaaccggttcaaggacctcatactggatcttcacaagcttcatcgctttcttaactgcttcctctgaagttcctgccacgattgcagctgcatctccaacgaaacgtactctctggtcaaggatcagacggtcataaggacttggttccggataggtctgaccagccattgtaaatcttttatccggacaatctttatatgtaagaacacattcgactccaggtactgcctcggcacgtgctgtattaatatccttaattaatgcatgcgcatatggacttctgattactttaacgatgagacagtctgacggcgcaagatcatttgtataaacactttttcctgtaacaagtgcagcagcatctttctttacaagaggacggtttacaatcttcagggattctatagcttctcctttttcctgattgctgtggacaaattccggtttctcaggaatcagattctgaactttatctattctttccattcttactcctccccgcccattttctttactgtaatgttaactgctgtatttctgacttccatatatttctggattgcacgaagctgtcccatgtatcctgtacagcggcacagatttcctgccagatattctttgatttcttctatagaagggttcttcaattcacggaacattgcgagcacgttcataatgaatcccggggaacagaatccacactgctctgcaccttcctgtgcaagaaatgagccgaattctgctgcttctttctccacaccctcaagtgttgtcacttcatgtccgtcaatgcttgctgcaagaacagaacaggacaaacgggattttccatcgatccatactgtacacaaaccacagtttgttgtctcgcatccacatttcacactcttacatccaagatcacgcagaaggttcaaaaggactgtatctgcagcgatctctgtacttactttctttccattcagggtaaactgtacttccatcctatttctcctccgcattatattcatctaaaattgagcgcatctctctgcgaagcaggacctccgcaaggtgctgtctgtactccgcacttccgcgcatattgcttccataagtaaattctgctgccacacgttttgcatactctgtgagctgctcgtctgtagcatctttcgggatctcccactgcttttcaagcaatgccgctttcatcggtcttgctcctaccgaaaagaaccaggactcctgacctctgtaaattcctgttacgacagaacatgtcagtaccggaaaatctgtctttgtctgacgaattgattcgtaacggaattttctcttgctctttctgacgatcacagatacaagaatatccttatctgcttttctgtttacaaactcagaaagtcgaacagttcctccattatataattccacaaatgtatccagtgccagtaatgcagtcagcacatcagaaaatccgtatcttccatagatactgcctccaactgttgcctgatttctaaactgaactccaacaatatgacgaaggctttctgcaattccgtccccatagaattttctcagcccctcatgctcttccagctggcgcagtgtacacattgctccaatgcggaatacatggtctgtctcctcaatctcattcaaaccaagttccgacatatcaatgattgtcttcactcttgcatttcctaatctcatccacatcatgccgcccatgatacgactgtttcttgcctgattcagctcgtaagcctcctccagtgtcttaactttcacgtaattaccgattgttaacacagtaggtctccttcctatccacataccttttccaagaatcgcggttctcatcctcgcaattttctcttgttatcttatgtcgtttcttgcgattgtttttcaaaaaacaaacatgcaagcataaaaaaagtgcaaatgaaacagctttgtcattcacacatctagcgaattaatgatatcatatatataagaaaaaagtcaaaaaatcggttatactttattataatcaatttttataaggtgtacttataacccaggtactataaataagaaagaaatccagaaaccatgttgacatcattgtaccctcggtgttattatttgcttaaacacggaaacgtagatagaggttgcatttttcataagtaaggtgacggatgtgtcaggaacagaagaactcatcggaaagggaaagatgccgaaagggtaagaatcctgagttcttgttcttgggcatgacgtgaatagcggcatgactgtcatcgcaagatggagagctatctgaattatacataatgtatatttggggacggcgcatcttgccgtttcttttatgtttatttacagtttacgcattcttgcatagatgtatattaaacagttactgctcatggctattataattatcgttcacaaggaacttatgcgcaataacctgctatgaccagtaatactttgtttcaccatgttgaaggaggataaaaagaatggcaatttttaaaggcgcaggtgtagcgatcgttactccgatgaaagagaatcttgaggtcaattatgacaaattagatgagatgttagaggagcagattgcaggcggaacagatgcgatcgtcatctgtggaacaacaggtgaatccgctactatgacagaggaagaacatgcagcaacaacccgttttgcaattgagcgtgtgaaccaccgtatcccggtcatcgccggaacaggttctaattgtacaagaacagcgatccagttgtccaaagaagctcaggaagatggagctgacggacttctgctcgttacaccatattataataaagcaacacagaacggactgattgctcattacacagctatttgtaatgaagtaaatattccggcgattctgtacaatgtaccaagccgtacaggatgtggacttcagccacagacagttgcaacacttgtgaaagatgttgagaacatcgtaggtattaaagaagcatctggaaatatcagcacagttgcacagatcctgcatctttgtgatggcaacgttgatctttactcaggaaatgatgatcaggttgtaccgcttctcgcacttggcggaatcggagttatctccgttctctccaacgtagctccggcttacgtgcatgacatgtgctacaaattcttctcaggagatatcgcaggtagccgcaagatgcagttagatgcacttccactggttgatgctctcttctgtgaagtgaacccgatcccggttaaggctgctcttaacatgatgggaaaagaagttggaactcttagagcacctctgacagagatggaagatgcacataaagaagttctgaaaaaagcaatgatggatcttgaaattctgtaagagaacaaagaaaggaagaagtgattttgaggtcgcttcttccttttttataattgcctgatccagcgtttctcttggtattaacatcacatcatatcgcccgtaaccgctttctctgttgaactttacttcataacgatctcttaattctaccaaaagtcccagaacgaatccatgataaaaacgctccggctgcttttttcctgccggatgtcttcctgtatcaaaactgttgaatgtagctagtgcaacttcattcatataagtattcatctctttcacattcccccaaagcatcgctttgataaatgcgttataatttgattcagaattagagaaccatccttgaaacatttcttgaattttctttatttttttcttgacattcatcactccataaggtatacttaacaagtcgcttgagttaagcgacaactgaataggggattggtcaaatggtatgataggggtctccaaaacctttggtgggagttcgattctctcatcccctgtattaaaaagccttagaaaccgcgtaaaatcgctgttttaaggctttttcttttttccaaaaagcaaaggtaatcaaaaaggtaatcaaccatatgttcgaaacatctgaagaaggaggaaatcttgcacaaatgcgtctcatatgataccaaaaagacctactttgctaaaaatttgattattttaaatgatattttaaagataaaaataaaaagaaatgccttagcagattaattcatattcacataaacatgaagaatactgttaggacatttcttttttatccgggtattaacacaagagtatcaaaatacaataaaacaaagttgattgatatattcttaaaaatagccacttttccttaaaacatctgtaattctcttttcctctattaagtagataccttatatgggtcttatacaactaataacaagaaataattaaagaatatccaactctttaaaaaagaggatttttattgaacatactaaattttagattagagttataaaatatttttatctttatcatttttaataatcttgtaagcttccaaaattccttgctttactgcagatttaataataaatgctagtaacggaattataaaaaaaataatgattaaagcaataaatagtatcatttgtaaatccatagaaaactccatttctaataactatagtaagtgtttcaaatttatcagatttattctagtataacatactattaatgaatgtaaagaaaaatattcctaagaacaacctttcctgatttccaaaaggaaattagagttactcaagggcgcatcttgcccttgtttaataaaagattcgttatgccttgcagtaaatcaatgttttaagttttcttcaatttggggaataacctgtgcctaagtgtctaaagtatgatatcatgtgagtaacaaattaaaagttgcaaggaaggaattatgaaatttatgcaaacagagaaaaaacagcttttgatctatgtgattatagcatacggaatcacatatgtaatgggacttctgatgtggtatggctatggaaaaggtcttaatctcagcgcttttccaaatgcgcagatgctgtatccagcagcaggtgtgatgatggcttatttaattaccaaaaaaggagataaaaatcttccaacggctttttacatattctttgtagctctcacggcggtgctggttgtctgcacggcggcttctgttctggctccccaaaatagagatctgatgagcatgccatattctcagtgggcaccgatcatggagtacgttataataggtggcagcgttattttctggattcttcttctgcaatccggtaaagaaaagcgcagagcctatggactgaacagcgaacattggaatatatctattcgtatgatcctgttgtttattggattatatcttctcagatttgtgattgccagtgctctgagcggccagctttctgaatttggcaaaataatggcaaatcccactacctggatcatattttttactgttttggtaaactttttcctttcagtagtggcattctttggagaagaatacggatggagatattatcttcagcctcttcttcagaagaaatttggactaaaaggcggcgtaatccttttgggctgtgtgtgggctgtatggcatctgccaatagatttcttctattacactacgccggatatggggctggcggctctggcaagccagtttgttacctgtatttcactggggatttttatggcatatacttatatgaaaacccagaatatctgggttccgataattattcattttctgaacaataatatggtggtagttttttcaggaacgtactctgcggatgtacttcagaatcagcaaatccactggggagatattcctgtggcactggtaatgaatctgctgatctttggatgggtgatctttctgaagtcatttaaggaaaaaaaagcataatattgaattcattcaaatcatttagaacaatttgcaggagtaccggcatttttaggaatagttattttaatttcatgtattgcagattggatgatatttgcaaaaattgaagtggcataacttataataggttaatcataattgtaatcaaaaatcactgtccattctgtggcaaatcattaagggttgtacctataaatagtgaagaatattgtccacactgtggttgtaaaatagaacaggagcataagaaaattccagttgatatttcacatattttaggaaatttaataactgttatatttgattatcaaattcttcgcaaacccttgaaaatactaagtttgtagcaagtgaactttcccttactctttcccttgtgttacattttcccattgcttttcatgaaccttaatatgggaaaaattaagggaaagaaaatttcataacacaatataacatataacaataacgacatggtgaactgattgaaatgttttcgatatttaactctgtaactgattatcaaaagaaaatggagataagatacgatgagaacaatttatgcagaatataatataaaccacgatagtattgatgtttacacaagtgctggatatatgcttcgcattgattgctgggaagctgaaaaaaatttaaaaaccacatatggatcagaatgtgcgcttacttcattggctgtggatgagcctttggaatatgcaagattatatcttgatggcaatttacagatgtgggtggatgcagaagattcattagaactttattaagcaagaagtgagatagtgttgtagggagtttcctgtagttaaagataccacacccgatatgatgaacccacgcttatacactaccagctatgataaaagaaaggacagcaatttgacactgctgtcctttcttttataaaattgcagtacacagaaaaaagctgtaaaatgaaaaatatatttgtccttgtaacaattctcggacatttgcctgttatactatctgcaaaaagaaaaggaagtgacaatatgaagcagattttaattgtcgaagacgataatcttttgaataaaacgcttacttataatttggaattggacggttacacaataacttctgttctgaatgcaaggacagccgctgaatcattaaaaacaaacatttttgatttggtattgctagatataaatttaccagacggaaatggttatgacctatgccgtcttatcaagccagagcatcctgatacagtagttatatttctaactgccaacgatcaggaaagcgatcagatacgaggatatgaagctggtgcagtggattatatcacgaaacctttttcgattagtgctttgcagcgaaagatcaaagccatgttcgctatgttggaacatcacaaaccagctaaggatatttacgaggatggtagcctgtttctggatttttcggaacaatttgcaagtttgaacgggaaaccattagcgctttctgcgatggaatataaaatgctgaacctatttcttaaaaatccgaagcaggtacttacccgccaacaacttttggaaaggctgtgggacattgatgaaaaatatgtagatgaacatacccttactacttctatcagccgcattcgcagtaagattgaagcggatggcgacacatatatcaaaacggtttacggtatgggttatcaatggacaggaggcgaaaagaaatgaaactgaataacctttctgctaagaaaatttgtagactgattagtgctggcatggttttctctatgctggtaattactggtattttcggcggtataatgcaggatacacgaattttcatagcgggtggaacattgacactctgtgcatttttctggatttggctattggtgctgttttttggaaaacgcctttctcatcttacttctaatttgtgccggacgctggacaacatgattgatggaaacgaggaattacaaaagtcaaatgatagtgaaactctttttgcccgtatcaaccaccgcttaatccggttgtatgagattatgcagaaaaaccgacacaagatagacatggaacgacaggagcttcaaatgctgatttctgatatttcgcatcaagtcaaaacacctgtcagcaatttgcaaatggtaacggacacacttttaacaaagcctgtttcagaagaagaacggatggactttttacaaggcatacgcagtcagactgataaactagattttctgttccaagcactggttaaaacatcccggttggaaaccggagcgatacgattagaaaagaaagacagcagcttattccatacgcttgcacaagctatgagcagtattgtatatgccgcagagaaaaaagaaattgctgtatccgtggattgcccggaaaatttgataatctcccatgacagcaagtggacaagcgaagcccttttcaatctgctggacaatgcagtaaaatacactccgtcaggtggaaagatttctgtatcagtggttcagtgggaaatgtacgtagaggtcaaagtgaccgacaccggcaagggcatttcagaaagtaatcaggctgccatctttcggcgcttctatcgtgaggaagaagtacacgatcaacagggtgtaggaataggtttgtatttggctcgtgagattgtaacaaggcaagggggatatatcaaggtcgtttcagagctggggcaaggctcagaattttctattatgcttcctgtaaggtaagatataaccactttttttgaaatgtccgagcgttgtaacatttcaccctgattttcgataaaaattttttctatctcggacatttgtgtaacatttgtggtttacaatggctttatcaacagatagaaagccttgaaaggagcatttgaatatgaacattttacaaacaatcgacttaaagaagtattacggcacagaaccaaatattactcgtgcccttaatggtgtaaattttactgtggaacagggagaatttgttgccgtagttggaacttccggcagcggtaagtctacattgcttcacatgatgggaggacttgatacccccacttccggcagcgtgattgtacggggagaagaactcgcaaaaaagaatgatgatgaattgacaattttccgccgtcgtaacatcggatttatcttccaaaattataatctggttccgattttgaatgtatatgaaaatatcgtcctgcctgtggaactggatggcgatacagtagaccagaaatttatggacgaagttgtgtatatgttggctttagaagataaactggaaaatatgccgaacaatctttcaggcggtcaacagcaacgtgtagcaattgcacgagctttaattacgaagcctgcgattatccttgctgatgaaccgaccggaaatcttgatagcaagaccagtgcagatgtgttagggcttttgaagcgtaccagcggagaatttaatcagaccattgtaatgattactcacaacaacgagatcgctcaactcgcagaccgcattgtacggattgaagatggtaaaattgttggctaaaggaggtgggaattatgaattatccttttgaaaatgataccagtgcagtaattaaaaaattagcacgaaaaagtgtgcgttttgataagaagaaaaacttattttgcctttcggcaattattgtagccgttgctatgataatgatgtcgttgctcacagtgcaaaatatcatttatcaaaatcagaaagaaatcgaaggattacatcaagggattttctttgacattacgcaggacagtaaagaaaagttgttagcaaacgaagaagtaaaaagtgtaggactttcctgtaatatcaaaacagtgaaagaaaattctaaagaactgtctctgatttattatgatgatgacatgcttagtttgattcctgcctttgacggaaaatatccagagaaagcaagtgaaattgctgttacagatgccttttttgccagtgaaaataagtctccggaaatcaacgccatagttcagttgaatctggatggtactttgaagaattatactattgttggtatttatcatgataaaacttctaccgcttatcctgtttttgtttcacttgaaaaatgccgggaattacgtggaaataacctgcttaatggatatgtttggcttgaaaatgcagatacccttacaaaagacgaagcaacagaaatattatctcaaatttcagaggagactggactgaataattggacagtcagcagttactatgattatgtaaatacaactttgtccttcagtaattatgcggtatatggtgtagttgctgccattttgtttttagctgccgcacttgtaatttacagcattttctatatttcggttggacaaaaagttgctgagttcggacagcttcggacaataggggcaagtaaaaagcaaatttataaaatagttcttaaacagggttatatgcttgcagttccggggattttaattggtagtatcatgggaacgatcatcagctattgtctgcaatcaaaaggctggtcagtatttgcatttattgtttctctatgtggcgcatgcctttttggaatactgcttgtttatattagtgttcgtaaaccagcaaaaattgcagcgaatacttctccaatttctgctctgaaaaatcaagtgggaattgtaaattaccgcactcacaaaagacatcgtattacgcccgtatatttagcgaaaatcagctttttcagaaacagaaaaaaatctctattgaccattttatcattgggactgtgcggagttatatttttccttgcagcaagttatcagagttcttttaatgccgagagtatggctcgttattgggatatgaagtacggagatttcaaaatcagcattgatttagaaaatgaaagtgaaaatctggatgctctcttgcagaaagaatatttttctgattatgtaaagcgtgttggagatatggagggagttagcaatatatttacttatgctaccttaccagttgattactcaacagacaatgatatttcagatagcaccttgctgctcggctataatgaaaaggatttggcatcgctaaatgcagctattttgtctggaaatattactgatgatacagaattagttgtaagtgaccccgaacgtatttatgatgtttaccattggaaacctcaaattggggatactgtgacctttaatttcaaaaatcatagtggtaaaacaataacaaaagcattcaaaattggtgcaatcacttccagcaatgatggaatgggtggctatattttcagaatgccggaaaatatgctcaaagaacttgcaggttatgactgtatatacgcaatcgaaatacaagcagaagctgaatatcaggaaatgatcgagcaggaactcgaattattagtttctgacaatagggatgttcgcttacaaaccattcaagattttattgtagaacaccaatcagacaatcgtgcaggttttacattagcttatgcgattgcagccatcttgtggatatttgcggtcatcaatcaaatcaatcttactgtgacaaatcttttatcacagaaacaggaaatgggcacactaaaatctattggtatgacaaataagcagttggagcaagcatttatgatggaaggtctttttactactttgattgcattgcttataactgctgttgttggaatccccggcggatatgcaatcggtatatttttgaaaaatgcaggcatgtctacgggatttgtatttccgatcgttgcttttactctttttgctgttgctatgtttatgcttgaaagtttgatgacaatattgcttattcattcatggaagaagcaatctgttattgcaataatgcgaaattgatgatagaaagcttttcatatctcggtcagctccacaattacattactctgctgatacagccagtccgtaaattctttcgggctggctgttcctgtttttacagccttttttctctgtaatacttcttttcatacagtaaattttcactaggctggtatggagtaattttactgtctatacagtaagttgaaaatactaatatggtcttttttctaaccaaactttaagataacatctaattccaacatatgcgccctgcgaaagtacgaaaagcaatagaagatttactgacagtacttttttgattgattctccaaaataaatgacaatagcaacacttgtcagtatcattagtagagtaataacatcccaacagtttttcttatataattctataacctttatttctatcagtatcgccagcatccctgttcctgacatacatattcctacaatcaatattagcaataaccaatataccattccggctataaaagcatttggaatttttgtactaatctgtgccgcagaatgcccggcatcaatcgtccatccgacaaaggtttgtatgaatgatgctaaatcattgaagaatgatttacaatcggaaagaaacgcatctgactgtattgcctgaaaaagagtggatatcagcgaataccatgcaagaagaaacaaggttgtttggaacattaccgtttttgctttatactgtccggcaagtcgctctttttgtgtttcgtatttcgtttttgcattctgataggctgcccggtcacaggcttcacatttttcatagagtaccggcttttccaccggtatctctacgattttctgatgtgtccgggcataatcccgttcctgtgttaagcagcgtattttatcttgacaatcctctatcgtgacgtttgcgcttcgcagcttttctttctcgatccgcaatgctctgtctgccatcttcaagtcgttctttaatgattgaatattcaatgctctgttctctttgtttaatttctcgttcaaggtcagagattcgttgagctgcgtcttcagttccacgataagctggtctttctgttccagttctgcctgtatctcctcggtcaagagcagaagttcttccaactgttcggcgttctttgattctctggattcgttcatctatatcacgtcctttctctatctgctgttccagttcagcaattcggtgttctgtttcagtaataaacggttttcgctgttcagcttctgtgccaatttctgccattgctgattttcgttttccaaaagctctatcttcgttttctgttcttccatcttggaaagcagttcctcggtatttggcaaaatgttgagcagctcggataactcgttgtttaatttttgtaatttctgattctgttcctgcataagagagagttgagtgtcccggttctgcatttccagaatcatttctgccattaggttctgctgttcttcgatttgaccaatcatggattccattaagggtataatttcccggctttcttctaatgtcatttaatcgctccttccataatgataatgcacccgatactttcccaaaggtgtttagtatcttttgcaataacgtgttttgttgttttatgatttgattttccgctactttccacgagccttttatttcctgcccggcaaaaaacttttgttcaatctttcttgcgtcagctccttcatggatggtaggaatctggagttttccctgcttttcataagaacgatgatcaacttgattatgcaaaggcagatgttcattacatacctttgcccattcactccgccacagttcacaattttttggattgttccatccagtagcatcggtcagcacccgtttccattgcaggcggtttcttgctccaatcttctgaattccgttttcgtctaatacagggatacggattccatgacggtcagggtttttcttatcctgccaccagttcggatgggattcatcaatcacgatatttccgtttttatctctgacaaaatcccaatccttgacttctttctttccccaagaatgatccgggttaaaaggacgcatagttagaagcagatggacatgggggttgccatcccctttgtcgtggatactccaatcagcgcacattcctctatctacaaaagttttttggatatagtcggttgtatattgaatttgttcctgtctgctccattctttggggagggcaaattcaaatgacctgccaagttgggcatctgcatttttttcaatcttcaatacctcgttccataacctctgtttctgaaatgtgattttgaatttttttaaagcagcttctttatcttctgaccttttgtatcggacagatttttgaaagcgttttatattttcttctggtactatctgccattcaggaggtgcgttttcgcacatcatcagccgggtgttgaccacttcttttttagaagtgtaataactgattctccctgtttcctcgtttttcatcacatccccattgagatatgcggaagcggagataacagatttccctttacttcgtccgactattttgattgtgtaatgaaaaatcgccatgtctggattcctcctttctgacgtatccggcatagatttccggcaacattgctttcagttttagaaaaagcagcattgccggaacgccctctgcgtaagagtgccctgcgcatagcagcctgcatggaatgcgcctctctggcgaagagtgcctcctgcggcatgagcaggtctggctgaaagccccgccgacggaacgagcccggcaagcgtgagcgcagaccggttgccacttgtggcaaacttattgggacgacctctggttgtccataaatgcgcccttcatgaaaaagcaatgaagggaatgaaaaactcatcccctctgccattacacttcctccatatcggtattggtttctttctgcattgcttttgagaaaaatctcccattggcttcctgccttttcagaaaaacaatcagctttgggatgtcttcttcctcaataggagcaccaagaacggattccaccgcaccgccaatctgacagagcctatgggttcgttttttactttcctcggttttctttcgtttcagaagttctttcttctgtgctgcatatcgttttgctttttcaaggctttcctgttcctttttttccatttcaagcattcgttcttcataactttttgttgattttgccattattacattctcctttcttttgcaaacataagttctcggttgcgtatcagaagaagcacatggtataatcttcttgcgtgtaggtatatcatggctttggtctgatagaacctttggcggtttctttggaagccgcctttttaatttgccacagttcttgttacagcttttacatttactctatccctcaaatcacgaccttcattagcttccataaacatttccagaatatcggttttaatcaggactttgcgaccaacctttaatactggaagtttcttccattctacaagctgtcttaaggtgtttctgccgattcccgtatagtcagcagcttcttcgatggataatgcaatttttctttgcgtcatataatcacctccttataaattgcattatgcaattcttgtgatgtaagtatatccttttcacatctttttgtcaagcgttacgaaatgttaaaaataaactttatattgcatattgcaattttagaaaaacaatgctataattcatacataccgaaaaaggaggcagtcagcatgaaagataaagaattacgcaagctgatagggagcagagtaaaacagcgccgtctggaattgaatctgacacagccttatgtcgcagaaaagatgggtgttaccgcttctacaatcctgcgttatgagaatggttcgattgacaatacgaaaaaaatggtgttggaaggtctttcggaagcactccatgtatctgtggaatggctcaaaggggaaacagatgaatatgaaaccgatattacggataagagagaattacagattcgtgatgcgatgggagatattctggaacagttaccacttgcccttaccaaagaagaagatgctttttcaaaagatttattactgctgatgttaaaacaatatggtctgtttttggattcctttcagttcgcctgcaaaaacttcaagggaaatgatggtcagacggatattgccaaaacaatagggtttgaatcgaatgatgaatataatgagattatgttcttaagggaaatcactcacaccatcaatgcttttaatgagatggcagacatcgtaaggctctattccaagaaaccaaaaacagcagagcaaaggcttgcaaatcttttatcagaagtcttatacgaagattccgaatcggtatagtaagacagccggagttatgatatacttacacgcacgaagcatttcatcagttccgattgtctaatatcgaaaggagacatacgattatggcaaaaggatctgtaagaaaaaaaggaaagaaatggtactaccgcttctatgtagaggacgcaagcggcaatcttgttcagaaagaatgcgttggaacagaaagcaaaagtgaaactgaaaaactgctccgtcaggcaatggatgattatgagaaaaagaaatttgttgccaaagcggaaaatctcacagtcggacaacttttggatgtgtgggcagaggaggaattaaaaacaggtacgctcagcaatggtactgtggagaattacctcggaacaatccgaaatattaagaaacatccgctggcagaacggaaattaaaaaatgtaacctctgagcatttgcaatccttttttgatttgctttccttcgggggagttcatcccgacggaaaagagagaaagggttacagcaaagattacatccattctttttccgcagtcatgcagcagtccttccgctttgcagtatttccaaaacagtatattacgtttaatcccatgcagtatattaaactgcggtatcagacggatgaagttgatttgttttcagacgaggacatggacggaaatatccaaccaatttcacgagaagattatgaaagattgcttgcttatctgaaaaaaaagaacccagccgcaatacttccaatccagatagcctattatgccgggcttcgtattggagaagcctgcggtttggcgtggcaggacgtaaatctggaagaacaatgccttaccataagacgtagcatccgatacgatggctcaaagcgcaaatatatcatcggaccaaccaagcggaaaaaagtgaggattgttgattttggagatacgctggtagagattttccgtaatgcccggaaagagcagttaaaaaatcgaatgcagtacggagaactttatcacacgaactactacaaagcggtcaaagagaaaaacagagtgtactatgaatattattgtttagacagaacagaggaagtcccgacagattataaagaaatttctttcgtctgtttaagaccggatggttgtttggaacttccaactactttggggactgtttgcagaaaggtggcaaaaacattagagggatttgaaggctttcatttccaccagttacgtcacacctatacaagcaaccttttagcaaatggagctgccccaaaagatgtgcaggaattgttgggacactcagatgtcagtaccacaatgaacgtctatgctcactccacaagagatgcgaaacgaaaatcagttcggcttcttgataaagtggtgggcaatgactaaaaaatttcccttatttcccttgtgattatctcataagggcaaaaataagggaaactacatatcatttcactaatggacaggcgggaaagcctataaaatggggaaagttagaggaataattatataaattccagtttgatggagaaagcaaaaatcagtcatgccctttatcatatagtttctgtatattttttggaagtttgtcaggcaacatggcatttatagcatcttcgttaccatcttttattgctgtttcgtaataccagcacttgaattttaagagggagagagttttttgaagttcctgaatttcagtttcaacagctgattttctggtttcaaataattctttccttttttcatagctggagctgccttcagatacccagataaaaaattgctttatatcttttatctcaagaccggatttcttcagacattcaatgatacgaagtgcttctaattcattatcgctgaaataacggatatttcccttgcgttccagattagggaaaaagccttccttgtcataataccttaatgtagaaacaggaagattaaacattgcagagacctgaccgattgtatacataaaaaaccttctttcaaatttatgcttgacctaaagttaactttaggttgtaggatatttatatcatatactattgttagtgtaattacaagaaattttgcatatggaggttatatttatgttgaaaacagaagaattaaaactagtatctgaatgggataaaacttttccacagagtgaaaaagtagaccacacgaaagtgacatttataaatcgttatggaatcacacttgctgcagatctgtataagccaaaaaatgcatctgggaaatatcctgcgattgccgtaagcggaccatttggggcagtcaaagaacagtgttccggattatatgcacagacaatggctgaaagaggatatttaacaattgcatttgacccttcttttacgggggaaagtggaggctatccaagatttatggcttctccagatattaatacagaagattttatggctgctgttgatttcctttctgttcgggaagatgtggatccggataaaataggaatcattggaatctgcggctggggtggaatggctcttaacgcagctgcgttggatacaagaataaaagcaaccgttgcttctaccatgtatgatatgacaagagtaaatgcgaatggatactttgattctgaggacagtgaagaagcacgttatgcaaagaaacagtcgctgaataccctcaggacagaagaataccgtaaaggcgaatattcaagaggcggtggttgtgttccccttccggttccggaagatgcacctttcttcgtaaaagattacagtgagtattataaaggcagatgttatcataaaaggagcctgaattcaaatgatggctggaacagtattggatgtatgtcatttatgaatcagccaatattaaagtacagtaatgaaataagaagtgcagtcctcatcgttcatggagaaaaagcacacagctattattttggaaaagatgcttatgaaaatatgattaagaacagcaagtacacatccaataaagaactgctgacaattccgggagctgttcatacagatctatacgataatccggatgtgattccatttgacaaaattcagaaattttttaaagaaaacggagttggttaattatgacgtgtgaagaatatttgagtaatatgaagcccggatatatcgtagatggtggaagtgaagaacatttggttatgcatgagctgtctcaaagggcattaaagataacgatggagctgaataacaaatatcatacaaaagaagaaattatacagcttatgtcggaacttaccggacaaaaaatagatgaaagttttggaatgtttcctccgttttatacagactgcggacgaaatatccatataggtaaaaatgtttttattaatgcaggatgtaagtttcaggatcagggtggtatttatatagaggatggagtcctgattggacataatgcagtattggcaacgatcaatcatatggaagatcccgagaaaagagcaggtatgatatttcagccgattcacatcgaaaaaaaagtgtggcttggagcaaatgtaacggttcttccgggggttacgattggtgaaggttcggtcattgcagccggtgcagttgtaacaaaagatgttccggccaatatgattgcggcaggagtgcctgcgaaagttatacggaaggttaaaaaagacactgaaaaaggagaaatttaatcatggcaaaaaaagtattgatcatatcgacaagtcttcgaggaggcagcaattctgatatacttgcaaatgagtgtgcaaagggagcaaaagaagccgggcatgatgtggaacttctttctttgaaaggaaaagatataaaatattgtatcggttgtctatcctgtcagaggaatgggatgtgtgtactgaaggatgatgttgcagatattatggcaaaagtaaaggatgcggaggtcattgtctatgcaacaccaatttattactatgagatgtgtggccagatgaaaacacttcttgatagattgaatcctttatattcgacagattattcattcagagatatttatatgattgcaactgccgctgagaatgatgaaagtgcatttgaaaaagcctacaatggtctgcaaggatgggtagactgttttgaaaaggcttccttaaaaggcattgtaagcggcggtggaattgatgacgcaaatacagctgcaagccatgtggatgtgatgaagaaagcatatgaacttggaaaggaattataatttgttggttgtcgctacaagaaaatccataacttcaagatgtgtagagctgataatcagtcattctatgattagaaaaaagagataattacaatcaataacgccggtgcgggattttgatatccagtaccggcgttattgattccacaggggcttggggggtgtagccaccaaatatactattcgttttctgcttcggcaagtttgttaagaatccactcccgattgataacaatatcctcatcatcgcggagatctttgaaatcattgcagtgtgaagaagcaaattcatacatattgtcaatgtcaactgcaccagtgatctcacccttattaatgattacaagaatatttgttccgtcgtcatcgacagcaaagcacaattcatcaaattctttattaggatcatttttgaggatagaatctgtcgcaagtaatttaacaagttctattattctgtcatctttaccagcatcaaagatctgtatcttttcaacgagttgattgggtgacgttacgattcgggctaaatatttttcaatacgaaaatcaaacaaagcattttcaccataaaacatttcatatgtcttctttacttctgattcaggaaccagataaatcatgacaagatcttccatctggtgatagagtgtggagtagtttaaacaaaaggtctctccacagctcgggcaggtataaaggaaaatagattgattaagtaccttctctttcatttcaggatccagtgcagtattaatactgtcccagagctcaaaatccccctcatgatggcaggaaggacaagttaccttttctatatgatgtcttgacataaatgttcctcctttcagtgagataaatctatagttttcttattgcagaatgcgcttatcctttattattttgccagaaaatcactctgtatctccatcggcatatgataagcctggcctcgttttgtcaggctgtatagtttaaagctcatgagttccggagtcgcattcaaagagctgcagagtccgaaataatccaggccctcgttctgaaccatgcatcagttggaaaagatctgatgccgacagaagagcgcggctctattgggcaggtaaagccatctggttggcatacgatcaaatatgacaatgtggatggcaaatatttatataatcgctgccatttgatcggtttcagctcactgcagaaaatgcgaatgagaagaacttaatcactgggaccagatatctgaatgttcagggaatgctgccgcttgagaatatggcagcggactatgtaaaagaaactggaaatcatgtgcagtatcgggtgactccggtttttgaaggcagtaatctcgtagcatccggcgtactaatggaagcggaatccgtagaagacaaaggcgaaggtattttgtgctgcgtttacgtttataatgttcagccgggaattaacatcaattatgcgacgggtgacagctcggtttctggaacaaacaagatggcagtaacagagcaggccacataggctgttacgcaggcagcttctcagcagaccagcacggaatcctatatcctcaataccaatacaaagaaatttcatcggccgtcctgttcatcggtcaaacagatgaaggagagcaataaaaaatcctcatcagagagtagggatgcgctgattgttgcaggttatgatccgtgtaaaaaatgcaatccgtaaaaatgtgtcagatattaaaaaaatatggaagaggaaggttgtagttctatattgcaatactttggtcggtttccctgggggttttgggcgtcagttgcttttggagcattaaggaattgaaagaacaggaaaaaagagtggcaaaaggatggttcccgaagcggaaggtggataagcactaaagaagaaagcggggagatgagaagatggtggtatggagattacagatgaatactggaggagcgaacgttgcggattgcttgcaaaaccatgttgcagcactttgggctggcaaggtacttgcttacttaatgggaaattactatgactcgaaagccacctacgaaaaactctttgattggaccgatgaacacaagtttaaaaccggcaaatactcttataaagaggctgtgatcgacgaattggccacagcctctcccagtgaatatctgacgaaaatatcgatacaagtgttttaaccctgccgcttcatcgcgtttcctccgcactgcctttacatttctcataagcaaatagcgccgctcccagcgcaccgcagagctgcgcctcatcacagatataaagtttagcaccaagcttctcttccaatgcctggatgataccccggttcttcgccacaccgccggtcatcatatattcgcctggatgatcctttccaaggcgggctgccaacgcgccgacttttgaggcaactgacacatttaaaccgtggataatatctgccacatccttattctgtgccaccagcgacacgacctccgactctgcaaacaccgtacacatgctggaaatcacgatattatgcttccattccagccctttcacactcatttcctccagggaaagtcccagcgttttcgccatcatttccagaaaacgtcccgttccggcggcacatttgtcattcatcaggaaatttttcacggctccctgcccgtcgatgctgatcgccttgatatcctgcccgccaatgtcgatgatagtgcggacattcggattcagataatttgcgcccttggcatggcaggtaatctccgtgatgctgtcatccccgctgtcaatgtaggatcgtccatatccggtcgtatcgatccgcacgatctcctctttcttaattcccgctttctcaatcgccagatccagactcttctcggcgctcatcatcgcaccgccgccggtcggaataatcatcgtcgatttaatttttccatcctgatccagtatgaccacatcagtacttgtcgaaccgctgtcgattcccgctacataaaaaatgcccgactccatcttctttcttacctcctcactgataccttttcccggatccatatcctctgatccctcgatcgtctcctcaaatgcctgaatgcgcgtcaaaagctgccccgcgctctgggtcgtaaaatcagtctcaatcttaaggagcggaaccttgatatcccgcttgatactcgcatactcaaatccataataatcacagaacttgatcgtgtgataaataattccctttaaattcggatccagatacagacggtttctgcggatcgaacggttcatgcggaaacacggcatctgtcccagcaggacgtccgcgtaagaaagaaacagctcctcttcctccatattccacatttcatcctgtacgaccgacagtttccgaccacccgtacaggtcagattttccacatccatctggatattgtctcggatcatatcctccagaatgccgctgacccgcacgcccagcacaccaatgtacggctccgtgttcatttccggcgtaataaaggacttgataaaagcgcgtttatcaaacactttcccggaatatgcctcatatgcctttttaagcctccggatcgtgcccgcaaatttcactttttcacattcattatcatcatgcggcagatccagcatatataaaaacttacattttcccgtgctctccacgatatcgtaaacgcgccgcatcgaatcgcagcagtttaccagcaccagctgttcaacctttccttccagcactgcctgaatgaccgattttccaaagccgcacagatttgcatgtgcaatttgatccgactgttcgaaattttccggcatttcctccaaaacagaacattcttctccaaacccccggaacagctcgattggggtgtacttacagacgtaataaatcatacgtgtttctcctccttgcccttttccagcatttccacaaacgcctgaagccgcgtcgatacctgaccgtcgctggtattggcggggttgcagccgtcaccgtcgagaatcatcgtcggaagtcctgtcttttctaaggactgcttaatcaggctggatgcaccgatcgttcccttacagccccagtgggcaaataaaacagcaccatccgattccgtgattctggcaagccgttccgcttcctcaattctctgtttcacactgccattgtaaatgcagtagaccattttctctgccatcgcctcatacgggtcttccgcctgcatctcctgaaaaccatctgcgatgaaatcacaagcgcggatgtgcattttcttactataattaaaagtatccttaaccggctcctgtaaaaatggcatgatgtgcatccagattaccgaaagaccatctcccctcggtgacatccgcacatcgcgcagaagtttttccgtataggtaaccgccgtctctgagccagccatcagatggcacataaaaagcgcatacaattcattcgtcagagaggtcaccgggtcatgcgcacaccgcagggcaagctgttttttataattcgctgccgctttccggctgttatctaccgcactccgcactgtttcctccgaaatccgtctgtccgtcgtctcctccagaaaccgtttcaatttccgcagctgatccgccacatacagaaccgattcccggtttttctcatacggaacatcaatataaaagcctggacattcaaatttatcctttaaatacggaaacgtcatcatatttccatcacacgcaaggttcgtataaatcatgcagttcggttttggcagaatccccgtcagcgccgcccccagaaacaccctgtggtacgaacacatcgtctccggaaatccttcttcctccgttttccgaagaaacgtctgctcacacttcgttcccgccataaaacaggacatcgcctccactgagtacggcgtcagccctgccgccgtcaccagctctcccggcacaaatatgctgaccatcgccgcattctccggttccgacagcgactgaatgatatttttcataaccacccgcgccacatactgtcccgacgacggcagccctcgatccggcaaaaactgaagcttcttttcctgcaggcggtatcccgcaagaagcagccgacgcgctttttccggatccttaagcgcctggctgctcaccctatttccaaatttttcaattacatccattgttctttcttccattcttttaagttcatttttctgttatatcgccctgatgcagatggatatggttccgcgcctttgcaggcaaacggacattctttattatagtcagttggatgggaattgtaaatatatcggatatgaaatgcgaaacagcgagggagaagaactttacgcctgtgacaaaatcatctatattccaaaaaactgagcaaacaaccaccgtaaacgatgaataatccaccgtattgcctactgcctccttggtatccttctccttaaataggcagtggttcatggggttctggtgtttgattttcaacatcaatcaatctgcagcagcgttcctttataaagttgctccacggtaacagcttttctatacctgcgggctcatttttgtagtccggcatataaagtagtactgtgtagagatactggaacacattcagattgttggcttttgcggtttctacgatactgtacatgacagcactcaaaggtgcattgactaaaagaaaaagatcgtatagaaaagccttttacttcagcaacataccttctgaagattgtaagtccgtctcggtaggttttcactgttttggaactggcactgtcctgaggaatatatactgtcaggaaatcatacgtcattgaaaagaagagttttttacttaatagcgatgtcatcgtatcctcacctccggcagtacaagcgcagaaatcgaatctttctgacggataaaatccagggattccaaaaccgattaaatctatctccaagtgcaccagaagaaagatggaatgctggattgaccgttgggaaaagccatttatcctgtacagaaaccatgctttttatgaaccggcaatagttctctaatagaaaagccatatcctccgaaatactgatgatccgttctttgtgtcccttggcattccttatttcgattgtacgctcttttatatgaagctccgagatctgtatagacacagcttcagatctccgaagtcctgtagggaggatcagcctgaagatcttagatgggttgagcttgcagtatgtatgagaaatgcaggacttcccatagaaagtctgattgaatatcaaaggctatttagggcgggagattctacaatacctgcattgcacatgcaaaagaggataaacagacaggaaaacgaccagagatactaaatctgccacaggacatagatcaatatgacgagatttatcttggatacccgaattactggggaaccatgccaatggctgtatatacttttctggaaagttatgattttacaggaaagaaaattcatccattctgtatgcatgaaggaagcggattgtcaaatacggagagtgatattaaaaaaagtgcaaaaggtgcagtgattgagaaaggcattgcgatacatggaagcagcgtagatcaagcgaaagatgtacttgaaagatggatacagaaatagaggttagaaaaatggaatgcaaggaaatacgtgttgatgtaagaactgcgtcaataaaagaaagtatagaagggcaacgtcagacaaaaatattatttcagattaatcatacaatgccttttactgatgaatataatcatttattaaaggaattgtttggaaataacctaggagatgggagtatgatatcaccaccgcttaatggagcgtgtgttggaagcgtaaagattggcaggaatgtatttatcaattctaatcttcttgcaatggcaagaggtggaataacgattgaagacaatgctatgattgctgcaaatgtacagcttatttccaataatcatgatccatatgatttgtgtactctgacttgtaagcctgttctgataagagaatatgcctgggtaggagctggagctacgatacttccgggagtatgtatcggaagacacgcaattgtgggagctggatctgtagtgacaaaggatgtaccggattatgcagtagcagttggaaatccggcaaaagtaataaaaatgcttgataaagaaaaatttcaggaggattaaaaaggtggaaaatatgaagttgaataacaatttggaatgtccaatgcttggactaggaacttttatgttatcaccagaggatgcctacacaagtacattagaggcattaaaaatgggatattccctaattgatacagcaaatgcttatgtaaatgagcgtgcagttggaagagcaatcaaggatagtggaattgacagaaaaaatatatttctatcaacaaaaatatgggctagtgaatatgaaaatgagaatactgtagaagaaactctagaaagacttggtgttgattatgtggatttactttatatacaccagcctgcaggcaactggcttgccggatacagaatgcttgaaaaagcgtatagagagggcaaagcaaaatccattggtatctcgaattttgaaggaaaatatatggaagagttggaaacaaagtgggaaattgtacctcagtttattcaggtggaagcacatccatatttcacacagaaagaacttcgtgtaactttagacaaatatggaattaagcttatgagctggtatccgctgggacatggagatacagcattaatgaatgagttggtatttgcaggacttggcaaaaaatatggaaaaacacctgcacaggttattctccgttggcatactcagatgggatttgttgtaattcctggaagtaaaaatgcagaacacattaaggacaatatggatatctttgattttgcattaacagatgaagaaatggaacagattgcaaagctggacaagaatgaaagatattatcccgcacggatgaacagcttgtacagtttgcaaactggaaaccagagtttgaaaaataatatggagaaaatagtatgagcaaaaatgatgtatggctgaatcgtaatggtggccaactgagtgaactcgatggaacggaatggttatatcctccgggtgctccgagcaccggacgagcaccgaaagatgctttacagagatgaaaacaggttttcttattttgacagggagtaacagaatagttaggaaaaccaaggatttccttgacttaggttgactaatcattgtatgtatttacagtggtatctcgagctcctaagcgaagggtcggaggttcaaatcctcttggcgacgggcttcaaagcgttcttgacacaaaattccattcaaaaggatcaatttccagtttggagaattgaaaaaaacggaatttacctattaagacatataaactgtttacaataaagctcctatatagtattatttttaataaactactatataggagcttttgtatggaaatgaatggaggatttcttgttaccaaaataaaacagcttggagaccggattttcgagaagattctcagtgaaaagaatattgatgcgtttaatggagcccaggggcgtattctttatgtgctgtggcagaaggatggtatttcaatcaggtcactttcgactaaatgcggattagcgataacatctcttactacgatgctggaaagaatggaaaatcaagggctgataagccgtgttcagtctgaaacggacaaaaggaaaacgctcctgtttctgactgagaaagcacatgccttaaagggcgagtacgattctgtatctgatgagatgggcagtatttactacaaaggtttttcagaggaagaaattatccggtttgaggaatgcctcgaccgcatcagaaagaatcttgaggagtggcagaagtcatgagtatttgtatcaaagatcagattcagaacatgaatatcgtcattggctgcacagtggggtgtacatattgctatgcccgcaacaacgtgaaacgctggcatatgattgatgatttcgctgaccctgaattctttccgggtaagctcaagatgatggaaaagaaacgtccgcagaactttcttcttaccggcatgagcgatctctctggatggaagccggaatggagagacgaggtatttgcaaagattcgtgaaaatccacagcatcagttcctgttccttaccaagcgacctgatttgctggattttgataccgatctggaaaacgcatggtttggcgttacggtgacgaggaaaacagaactgtggcgtatcgacgcccttcggaaaaacgtcagagcaaaacattaccatgttacctttgagccgttattcgatgatcccggcacagttgacctttccggaatcaattggatcgttgtcggcaccatgaccggagctcagagcaggaagattcatacggagccggaatgggcctggtctctgacggaccaggcacataagctcggcattccggtgtttatgaaggaagaccttgtccctatcataggggacgaaaatatgattcaggaaatgccggaagaatttaataaagtgttagaggtacagaaatcatggaagaagtaataaatggaatcctcattcgtgaggtggaaacaaagaacatcatgactaagtctagtctgccggtaggcggttactcggtcaatccctatgtgggctgtacacatgcctgcaagtattgctatgcttcttttatgaagcgctttaccgggcacaaggaggagtggggcactttccttgatgtgaagcattggccggaaattaaaaatccgaagaaatatgccggacagcgggtggtcatcggttctgtgacagatggctacaatccacaggaggagcaattcgggaataccagaaaacttctggagcagctgatcggcagtgacgcagatattctgatctgcacaaagtcggatcttgtggtacgggatattgatctgctgaagaagcttggacgtgtaaccgtttcatggtcgatcaacacactagatgaaaatttcaagaacgatatggattctgcttcgagcattgagcaccgtatcgctgctatgaagcaggtatatgaggcaggtatccgtacagtctgtttcgtatccccggtattccccggtatcacgaattttgaagcaatctttgagcgggtaaaggatcagtgcgatctgttctggctcgaaaatctcaatcttcgaggcggtttcaaaaagacaattatggattatatcgccggaaaatatcctgatcttgtaccactttacgacgagatctataacaagcataaccgcagctactttgaagcacttgaagtaaaagctgagaaaatggctaagaagtatgattgtgcctttgtggataatgaaatgccatatggcagagtcccgcaggggcatccggtgatcgtagattatttctatcatgaggaaatccgtgggacagagaataccggaaaaagaaatcgctaactcccgaattgtcgatttctttacattgataaagttcaatttatctctcgattcataatttactcttcaagtaaattacccacatgctttgtttcaaagaacatttctctatttataacaacaattataattgccgcaataacaacaaaaatagtttgtatacattttgtttcaggagtcatgtttatcttttcctgcataatatttataaacaaatgaaaaataattgttgcaagcatacttctgttattctttacatatacccatgtctgaaggaaatcaagtggtatcacgctaagaagaaagttaatcacatacatgattcccatctctttaagtccatactggtacgttccaggtatccagaataatggcacatgccacaaagaccagatacatccaaagatgatagactccttaaaccagctgttgtatgcaccaacagcatcctctccataacctctccaacctaactcctctatgcaggatgccaacaaaattgtaagaaatgcagacgtaccacctatagaaaatgaaaagtcttctgtaaatgaaaactgatttatactgccgccaaataatactgatgtaccgattgaagctgtcactatcacagcaaatatcagcactgcaattaatatatatttaggttttattctataaaacccaatcagcttcttcttaaagtcattaatgagtgctttattcttagacgtaaatacagttattacggcaaccacggcaggtgaaaccaagccaagaaacattccaagataaagccccgtcccttcattaagtaaaattgcaaatagccaccagaaccaagtgcaggcaaatgtaatcaaatagaatctgaccggtcgatatatatacttttccatgactacacctcagcctctacaatcacaagctcactctttataccattgagctcaatgtaattgtctgcttcggcatctgaaaagtcatcaacctttttgccctgtctctcataataaatatgagttgctattcccttttttgtgcttctaaatctataatctgcaggaattgtaagtctcgatgttgctgacaactgattaatctcaagcacaccctcatgtgataaaacactgatctgcatatcaagatttgaatctatctcaatttcacttttatttccccgaagagtaacttcgctaattttgccatttacctcaatatgttcattttctatatcagtaatattcagtgtccctgcattaactgataattcgatttttccaatatattttactggaataaaaatagtaatgaccaaactctcctttgcatctgcttcactggcttcattaaatctgttaagatcaatatcgattcggttttttatatcatcaatctttactttataatctgccagaagattcttatagacatttgaaaacattgcgacttcaattttttctccatgatatgcctttaaatctacagcatatgctccaccaagcttgatatcaaaattcttcttaccatcaatatcgtattcagtacgactttcatagatgtaattagactgctttttctctgatttctcattcgaaagtaattcatctactgatatttggaggagatctgctattgccatcagatttgcaatatccgatattcctgttccattttcccactttgtaatggcttgtcttgatacaccaattttctcaattctccaaactttatcgtcttgttccattcttatcaaaattcttttttaatgctatttctgttgggagaatagacccaattaaaggaataagttgaacaccacaaataattcctcccatactcccaacacaatcttcactttttccaattactaaaagcatgaatattactgttattggcaacataaccattccacagacataccagactttaccgcaatatttatgagcaaattcccatgtgtctttattcttcatagacatcgaagtccgatatccaaatactgaatttatttcctttggagcctttttcataaaatatcttccaaaaccaatcatcgtaaatggaagaagcaaatccataatcaacataaaaatccaaaactccattgtaaatctcctttactataacttccgctttgtattttcgtttttattcttttttgtgaaattctttcaaatgttccagttgacgaacactccatgctgcttttgcacattcttccatataaaatcttcttgcctgttcatcatttatacgcatcaagacacgataatgtgaccagctcaattcaggacacagtgtgtctcgaattggaaaagtgcaataaaactgcctcatcttacgccgaataacaaagtaacagcaacaatgctacaattccaaaccattccatattattctccttagcaaacttaacgctagcatgtctgttccttaaaatatcttttgccattcaaatcatatcacaccatcagacatatttccatttcgatttactcagtcaagtcacttcgctcagctacatttcctgtcggcttgcttctgtaactagtacagcgtttcacaaataactgtctcattcacgcagaatgcggattcgagtgttcagctgaaaaaacgtaggcgtagcgggctacgtcgaggctttttcaactgagcaatcggattcgcaggcaagtgtatgaggcagttattttgaaaacgctgtactagcatccggttattaagaagtctcttcaaacttactataccagtaacatgaagtagtaatataaaaagctttcggattttttcatttgaaccgaaagctttttatttcatcatcttctattatatctatcttcctgtctaaccggcactctgaccggtactggttctggcatcagtcccgggatcagacgatccataaaatctttgatcttcttccctgcttttgtattgatccatctataatactgttccattgtcatactgttttacctcctgttcaggtctcttatcataagcagatgatctgtatttccccatcatctctatgtcatactgttcttttctgacatggctgtattttatcagatgattttctttttgtcagtgcatttaccgcttattttagaattgtttatacttcttttatgaagttttggacacatttatcgtcatgatctgattttataaaattttcatttccctttatttgccacattgtctcatctatgttatgattacgttattgattgcgaaatatctatctagataataagatcaacaagagtataaatttcagaaatggggaactcatatgaagtctaaacataaaaaaggtgcgaaaagagctgctgcaagaaaagctgctgctgaaaaagctgctgctgaaaaagttgctgctgaaaaagttgctgctgaaaaagttgcctcaaaaagaaataacagaaaaaaggcttccctaagacgggaggctgcaaaaagaagaaattctactacatcagaacttattcaatggctaattgctattttagtggcttttattattgctttatttgttgataattttctaatcgtcaatgcacagatcccatccggttcaatggaaaacaccatcatgaccggagatcgtgtggttggtaaccggctttcttatttaaccaaggatcctgagcgttatgatataatcatttttaagtatcctgatgatgaaagccagctttttatcaagcgtatcatcggacttcctggtgaaaccgtggagatccgtgacggtcacatctacattgatggctcttctgaaccgctcgaagatgtagagacgaaagaatacatggtcggaaattatggtccttataccgtaccggaaggatgctattttgtgatgggagataatagaaatgattcgaaagattcccgctactggattaatccatatgtatccaaagataagattcttgggaaagcagtctttcgttactggccaattacagaaatgaaaacgattaaataattttcaagggcagatctgactcatacgagttaaatctgcccttactatttacatcttataacaacctttttcagaaatcacaaaatccatccgcagatcatgttcctccaccggaatttcgtctacaagcagttcctccctgcaaagtgctgctttcacgcaatgcgtcttttccagatatctgtcgtaatatccacctccgtgaccaaggcgtcttccgcttctatcgcagctgatacatggaataaaagcaaaatcaattgcttccggctgaatcaatctttccgggtcttcttttggttcaaggattccatatgcacccggatacagctcttgtaatgagtggatctcatatacgttcataattccttttcccgtacactttggcactccaagatgctttcctgattgaagaatatcttgcaatatagaaaatgtatctatttctttctctgtgctcacataacagaacacacagtctgcgctcttgtattcattcagttccaaaacactttctgtaatctttctgtctgcttcttttctgtatttttctgttgtaaaagaaagtttttcttttatttttcttcttaattctttcttttgaatcattttctcttctgtttttctttccaattcttccactcttctctcttttcgcttttttcctcttgtttaactattttcttcatcctgttcttctccgacagattcaatcagcaggtgatccagattttgcaggtctgcttttctgatttcatattttccctctttatctttttctacatgaagaacaattttatttggttttccgtacttcagccctttttctgccgcctgacttaaaacctcataatagatctgataaatttctgtctgcatctgtgtttcttctggcatagcctgtccgttcatcacatcatttgaaacttttgtggcgtattcctgcgccttctcctgaaattcagcataagtatccttcagcaatgtgattggtttcactgtaagagcaacctgataagttccattttcttccctggttgtttctcctacagtataagatgtcttctttgcaagatctgcaaacagttctctatattcttctgtcatctcatctgtcattacatgctccggaaatttttccattgtataagcaagattatcttcgaaaacctgttttgcttctttctcggaaatgccggtctgttttatataggattctgttttctgcttataagatacatctaaaaatgcctgtacatattcctgcggatcaaaacggtttatgtaacagtagatcattgttgctgttgctgcgacgataattgcaaccattataattcctactataaaatgcttcttttctttttttcctgacatcaactttacctcttttctaactgtaatttgaataacttatttgtaactgttcagagccaagcaaaatttcaaaaacaggtataaaatgcttgcatttttaaaactgtttttgaaattttatttggcggatacgccacaccgacgaaatgcgtagcattttggaggttggctctgaacagttacacttattttatttctgtcacagtatagcatgatatcagttcacattttgtagaacgatgtcgcatggtatatagcgcttttcagatagatggaacgataccgccttatatgcagcgcttttcagatagatgaaacgatgtcgctgcatgcaacacgtttcagatagtaagaaagagatacgcaaccgtatctctttcttcttgcaggcttgttttttttgtctgctttctctttcatttacagatcaaatctgatcttgatatatgctttgatctcttccacgcatttctggaatccaagctttccactgttcaggcacaaatcataatttcttgcatctgcccactcgtgtcctgtatggtaacgatagaaatcaccgcgaaatttatccgtcttctcgatgtattttttcatttctttttctgtcatactgttacgctccatcgcacgatcaagacagaatttctcatctgcatgaacaaacacactgacaacatttggattgtctttcagaacataatctgcacatcttccaacgattacacaggattctttctcagccagatctttgatgatctttgcctgatagttaaagatattttcttctgaaacgaagtctttatcttccggcggaagaagttctccgtcgtatggacgactgaggatcttgaaccagccggctcccttcatcttctcatcactcatgccgaagagtctctcgttaattccgctttcctcggatgccatacgcaggatttctctgctataacagttgattccaagctcttttgcaagcatagctccgattgtcttaccaccgcttccatactgtcttgccattgtaattacaatattgctgctcacctgaatcgcctcctattctcctaaatacgctttcttaactgcttcatcttccagcaggtcttttgcatttcctgacattgtgatcttaccagtctcaagaacatacgcgcgatccgcgatagaaagagctttctttgcattctgttctacaagaagtactgttgttccactctcacttactgcctggataatatcaaaaatctcatttacaaagattggagaaagtcccatagaaggctcatccatcagaatgatcttcggtttagacatcagtgcacgtcccatggcaagcatctgctgctctccaccactgagcgttccggccatctgatttcttctctcttccagacgtgggaatctcttataaacatttgcaagactctcttcaatctcatttttatcttttcttgtataggcgcccattttcaggttttcgtaaacactcagttcagcgaaaactcttcgtccttccggaacgtgagccattcccatagacacgatcttatgcgccgggatctttgtgatatcagttccttcaaacataacagaacctttctttggagaaagaagtcctgtaattgtatgaagtgttgttgtctttccggctccgtttgcgccgatcagtgcaataacctctccctgatttacctcaaaggaaatacctttgattgcctggatcattccataatatacttctaagtctttgacttcaagcattgccattgttatcttccccctattctcccagatatgccttgattacctgaggatcattcagtacatctgttgtcttgccctgtgcaagtacttcaccgaagttgagtactgtcagctcctcgcagataccacttaccagtttcatatcatgttcgatcagaaggatcgtcatatggaactcatctctcacgaaacggatcatatccatcagttctcctgtctcgttcgggttcattcctgctgccggctcatccagaagaagaagctttggatctgtcgcaagtgctctggcgatctccagttttctctgctgtccgtaaggaaggtttgcagccttatatgacgcaaacttctcaagatcgaataccttcagaagctccatcgccttttcattcatctctttttctaccttacgataattcggaagtcttaagattccttcgatcgtagagtaatgatgatggttgtgaagtcctactttaacattatcaagaacagtcagttctttgaaaagacggatgttctggaatgttcttgcaattccggccttactgatctcaatatttttctttcctgtaagatcctttccgtccaaaagaacctttcctgaatccggtttatatactcctgtcagaaggttgaatacggttgtcttaccggcaccatttggtccaatcaatccgtaaagttcttctttctgtatcttgaggtcaaagtcatttaccgcacggagacctccgaaagaaattccaagattttttacatctaataatgtactcattcttacttaagcctcctttttctttccaaagtgaagatacttctctctccactcaattgcctttggtgcccagttaaagagcatcatgatgatcagaacgatcgcatagatcaacatacggtaatcagacagtccacggagaagctccggaaggagtgtcaggataactgctgcaataatagatccacggatatttccgattccaccaagtactacaaagacaagaatcgtgatggacatattgtatccaaagttgtttgtatttgctgtcagtgttgacaggttgtgtgcatacagaacacctgctgcaccggccatagctgctgaaattgtaaatgccatgagtttatattttgtaacattgattccgatagactcagctgcgattacattatcacggatcgccatgatcgcacgtccgtctctggaattgatcaggttgagtacgataaataatgtcaccatgatcaggataaatccgatcaggaaagtggaatccttcggagttcctgtgattccctgcggaccgttcaggataactgttccgtctggatccatgtcaagtgccataacgtcctttgttgcaaaatgaaatcctttagaatcctttccaatataaaggacatttacaaggttcttaatgatctcaccgaacgcaagtgtaacgattgcaaggtaatcgcctttcagacgaagtaccgggattccgatgataacaccgaagattgctgctactacaacaccgatcaaaagtgcaagcagaaatcgtacaatcgaattctcgatcacatctctcatacattttgagaaaaatgcactggaaaatgctcccacacacataaatcctgcatggccaaggctaagttctccgagaatccctactacaaggttcagagaaaccgccaggataatatatgtacaaagcggaacaagaagtcctgtcaaaagactggaaatacttcctgtgctgcttaaagtctgcatcactacgaaagctacaatcacgatagcatacgtgatgagattacttctctttgttttattcatattcttcaacataattccatccacctacactttctcctgaatcttcttgcccagaagtcctgtaggcttcacaagcaacacaatgatcagaactgcgaacacgatcgcatctgcaagctgggaagaaatgtatgccttactgagtatctcgatgattcccagaagaattcctccgataaatgcacctggaatagaaccgattcctccaaatacagctgccacgaacgctttgataccaggcatcgcacctgtgtatggtgtcaggctcgggtaggtagaacacagaagcacaccggctactgctgcaagtccggaaccaatcgcaaatgtaagagcaattgttgcatttacattgatacccattaattgcgctgcgcctctatcctctgatactgcacgcattgcctgtcctggttttgttttctgaacaaatgtgatcaatgcgatcataataaccacacaaactacgatcgtaacaattgtctctcctgaaatattcagcttgccatctgcaagtgaaagtccgctccacttgatcactgatgggaatgtctgtgcattcgcaccgaagatcagaagtgctacattctgaagcagatagctgacaccgatcgctgtgatcagtacggcaagtgaagatgttgcattacgaagcggcttatacgctacacgctccatcagaacaccaagtactgtacaggcaatgattgaaatcaggattgccacccaggtaggaagtcctgcctgcttcattgtgatcaaagctacatatgcaccgatcatgatcacatcaccatgtgcaaagttcaacatcttggcgattccatataccattgtgtatccaagcgcgatcaacgcatagacactgccaagacttagtccatttactaaatatgaaataaagctcatatccgtccctctcatcctttttatatttttgtaaggtactactttaaccttttaaattgaattgattatagcataattattttctcgtatcaatacaaaaaacagaatccgctctgttttcctgcgttattttttaactttttgtaagaaaaaagacaacattttcctttttttctatctataccgaagaatactgtctttttcttctttcgcggattcttatttacagacttttatgaagtaatccaagtactgttgtcagatcttcaatccccatctgtcccggtgcagatactttcccaactgctccaaatgtcagtgcagatccaaagacttctccacagagacgactgatcacacctgttcctgacatagacattgtaatgatcggacgatccgcatactcgcttgccatctcttctgttgctgtaagaagtgtaagaacatctttcttattctgtggcatcacggcaatcttcggaatatctgctccaagctcctgcatttttcttaaacgggatacgatttcctcttttgccggagttttgtggaagtcatggttcgaagcgatcacttttactccatttgcatgtgctgtctcaacaacagccttcactacatcatctcctgtaaatgcttcaacatctaccagatcaacaagtcctgtcttcgccgcattctgattcagttcaacataagcctctgtctcgattgctttctctccaccttcttttgatgtgcggaatgtgaaaagaatcggcatctccccaagcacctcacgaagtgcctgcattgtcgcctctgtctttgtaaaatcaaagatatcttcataccagtcaacacgccactcaacaacatcagcctttgttgacttgatattctcggctgctgcaagaatctcttctcttgttacaccaacaataggtacgcagattttcgggattccagcgccaatttcaatatttcttacttttactgtattcatgattttttcctttcttaagcttcttcagaattcttcagaagcacaccatatcttacatttataaaaagtataatataaataatagcacaaagatagaacagcatgctatagaaaattcacaagcttgaaactatggccacaccaacggaaaaacatcttgtaaatcaaatgactaacactgctcctaaaagaagtcccccggcagaaacgatgtctgtcggggggacttctcctattcttttaatgtatctacaaagagcgttgctactctctgtatttatttttctaaacgaatctgatatatcaattattcagcagcatcttctgcctgaagtacctgatactctccactcttaacaacaactactgtaggatcttttgtaggctctccatcctctgaccatgtgatgctctttcctgtaagtccatcatatgtgatctctgtcataccttttttaagtgcgtcacagatatctgatacgctcttatccggtgtaacatcttctttctcagctgctgttttgattacgtatacacagtcataagcatctgctgcgaactgaatcggtgtgtctccgaatgcttctttgtaatcagcaacgaatttctgtgttgcttcgtctgtagcatttgctgtaaatggtgtaaggaacattaagtcttctgcaagacttgcgtcaaatccatcaagatcaaggataccgtccataccgtcacatccgaaccacttcggtgtaaatcctgctttgtttgcctgagcaagaatcagagaagcttcctgatagtaaattggaaggaatacaagttcagcacctgcatcttttgctttctggatctgtacagagaagtcagtcttgttatctgctgtaaatgcttctgctgctacaacatcaagtccttttgcctttgcctctgtcgcaaatgtctgataaattcctgatgaatatgtgtcagagctgttataaatgattgctacttttgttgcaagcttgttctctgcaatgtaatctgctgatgcgctaccctggttaggatctgagaaacacatacggaatgcattgtcatactggatactgtctactgctgtagcagatggtgtcagctggaacatgttatctgaatgagtctcctcaacaactgctgtacaaggtgtagaagttgttgttccgatcagtgcctgcattccccagtctttcagagtattgtaagcgttcacagatttctctgaatcagcctgatcatcttcaaacttgtattcaatctgctttccgttaattccgcctgctgcgttgatctcatctactgcaagctgaataccattctttacagctgttccgtagattgctgcatctcctgttgtaggtccgataccaccaatcttaaaagtgtcagaatcggatgagcctccgctctttccactatctcccgaacttccacatgctgctaatgaaaataccatagctgatgcaagcattacacttgctgcttttttccacatcttcataataatctcctcctagaaattaaaataataaactttatgtgtcatatattagctcgtagaagtatgatttgtcaagcagaaatagagtgcaatctgttttttatctatattcgttaaatatggtcaagcgatgttaaaatagatcaagttagttgttatatctattaatctgatatcttaatacatttcgttctatggaaaaattccaatttacactttggtttgctgtcaacaaagatactccgttttaattttgcaaagaaaaaacagtgctttcgcactgcttctcattcctgtctatattccatgtaccttcaaaactacatacagtcaaaaccaacatcatcatccaaacctatcactgctttggttatgccctcgacctattagtaacagtcagctccatgtgttaccacacttccacctctgccctatctacctcgtcgtcttcaaggggtcttactaacttgacgttatgagatatctcatcttgaggggggcttcacgcttagatgccttcagcgtttatcccttcccggcttggctactctgctatgcctttggtaagacaacagatacaccagcggccagtccatcccggtcctctcgtactaaggacagctcctctcaaatatcttacgcccacgccggatagggaccgaactgtctcacgacgttctgaacccagctcgcgtaccgctttaatgggcgaacagcccaacccttgggacctacttcagccccaggatgcgatgagccgacatcgaggtgccaaaccactccgtcgatgtgaactcttgggagtgataagcctgttatccccagggtagcttttatccgttgagcgatggcaatcccactttataccaccggatcactaagtcctactttcgtacctgctccacccgtcggtgtcgcagtcaagctcccttctgcctttgcactcttcgaatggtttccaaccattctgagggaacctttgagcgcctccgataccctttcggaggcgaccgccccagtcaaactccccacctgacattgtcccccagccggatcacggctgctggttagaaacccagtactgcaagggtggtatcccaacattggctccatggcaactggcgttaccatttcctagcctcccacctatcctgtacatgcaataccgaatcccagtatcaagctggagtaaagctccatggggtctttccgtcctggcgcaggtaaccagcatcttcactggtatttcaatttcaccgggtgcattgttgagacagtgcccaaatcattacgcctttcgtgcgggtcggaacttacccgacaaggaatttcgctaccttaggaccgttatagttacggccgccgtttactggggcttaagttcaaagcttcgcttgcgctaacctctccccttaaccttccagcaccgggcaggcgtcagcccatatacctcacctttcggttttgcatagacctgtgtttttgctaaacagttgcttgggccaattctctgcggccatcttactggcactccttctcccgaagttacggagtcattttgccgagttccttaacaatgcttctcccgtcggccttaggattctctcctcatccacctgtgtcggtttacggtacgggtatcctgcaaacaatagcggcttttcttgacagtcagctcacgtgcttccctacttattttcagtccacatcacgtcttcagattaaagagcggatttgccaactcttctcctacctcgcttgtaccggtctttccattcccggctcacgctctctgcctgtgtccccacagttctgttacaggatagtacaggaatttcaacctgttatccatcgactacgtctttcgacctcgccttaggccccgacttacccagagcagatcagctttactctggaaaccttagatattcggccggaaggattcccaccttcctctcgctactcattccggcattctctcttcttaaaagtccacagctccttccggtactgcttcgtccctttaagaatgctcctctaccaattgaattctcaattccaaagcttcggcagtgtgttttagccccggacattttcggcgcaggacctctcgactagtgagctattacgcactctttgaatgaatggctgcttctgagccaacatcctagttgtcttcgaaatcccacatccttttccacttaacacacattttggggccttagctgttggtctgggctctttcccttttgaccacccaacttatctcggatcgtctgactcccatacatcatctacacggcattcggagtttgatatcccttagtaagctttgacgcccccttaggaattcagtgctctacctccgcaagactcgtatgaggctagccctaaagctatttcgaggagaaccagctatctccgggttcgattggaatttctcccctatccacacctcatccccacccttttcaacggatgtgggttcggtcctccattgccttttacggcaacttcaacctggacatggatagatcacccggtttcgggtctactccgactgactatgcgccctattcagacttggtttcccttcggctccggacctttagtccttaacctcgccagccagcgtaactcgccggaccgttctacaaaaagtacgcggttgagcatataaagctcttccacagcttgtaaacatatggtttcaggttctttttcactcccctcccggggtccttttcacctttccttcacagtactatgcgctatcggtcactaagtagtatttagccttacggggtggtccccgcatcttcccacaaggttccacgtgtctcgtggtactctggatcccgccatgtcaactcgtctttcgcttacggggctttcaccctctctggccggctttcccaaaaccgttctgctaaactcgttgaatcaattccgcggtccgaaccccagcatgcacgcacgctggtttgggctcttccgttttcgctcgccgctactcacagaatcacatgttgttttctcttcctccggctacttagatgtttcagttcaccgggttcccttccttaagttatgtattggcttaaggatacttgaggtttgctcaagtaggtttccccattcagaaatctccggatcaaaggatatttgctcctccccgaagcttttcgcagcttatcacgtctttcatcggctcttagtgccaaggcatccaccatacgctcttatcagcataaccaactcgacctcatcccacgggaatgggataacgtccacacatacatagcgttgtatgcgttggtgatagtcaatttgttttaagtctgttttcttcagactgtaagttaatgttgttaacattacctcggatgtcttgattagatatttatctaaatctattgatttttactatatgcagttttcaaggtacataagatgaagtccttattcagttcttcatccgactgactttttcatcagtcatcagagactaaaagctttcttttaaactctgatcactggtgaagaccagctttatcgcagaacctctcggtttattttctttttaatttggcggccacctactctcccacaccgtctccagtgcagtaccatcggccgcttaggtctttaccatcgtgttcgggatgggaacgggtgttacccctaagcgcatcgccaccaaaaggtttaggttacttgataacccaacaatagacaacagtaaaaactctctacttctttcttccgttttagttggattgttccagacgaaagaaagcatttcttccttagaaaggaggtgatccagccgcaccttccgatacggctaccttgttacgacttcaccccagttatcggtcccaccttcggcagctccctccttacggttgggtcactgacttcgggcgttactgactcccatggtgtgacgggcggtgtgtacaagacccgggaacgtattcaccgcgacattctgattcgcgattactagcgattccagcttcatgtagtcgagttgcagactacaatccgaactgagacgttatttttgggatttgctcgacctcgcggttctgcctccctttgtttacgccattgtagcacgtgtgtagccctgctcataaggggcatgatgatttgacgtcatccccaccttcctccaggttatccctggcagtctctctagagtgcccggccaaaccgctggctactaaagataggggttgcgctcgttgcgggacttaacccaacatctcacgacacgagctgacgacaaccatgcaccacctgtcatccctgtcccgaaggaaaggcaacattacttgccggtcagggagatgtcaagagcaggtaaggttcttcgcgttgcttcgaattaaaccacatgctccaccgcttgtgcgggtccccgtcaattcctttgagtttcattcttgcgaacgtactccccaggtggactacttattgcgtttgctgcggcaccgaacagctttgctgcccaacacctagtagtcatcgtttacggcgtggactaccagggtatctaatcctgtttgctccccacgctttcgagcctcaacgtcagttaccgtccagtaagccgccttcgccactggtgttcctcctaatatctacgcatttcaccgctacactaggaattccgcttacctctccggtactctagattgacagtttccaatgcagtcccggggttgagccccgggttttcacatcagacttgccactccgtctacgctccctttacacccagtaaatccggataacgcttgcaccatacgtattaccgcggctgctggcacgtatttagccggtgcttcttagtcaggtaccgtcattttcttccctgctgatagagctttacataccgaaatacttcatcgctcacgcggcgtcgctgcatcagggtttcccccattgtgcaatattccccactgctgcctcccgtaggagtttgggccgtgtctcagtcccaatgtggccggtcaccctctcaggtcggctactgatcgtcggcttggtaggccgttaccccaccaactacctaatcagacgcgggtccatctcataccaccggagtttttacccctgcaccatgcggtgctgtggtcttatgcggtattagcagtcatttctaactgttatccccctgtatgaggcaggttacccacgcgttactcacccgtccgccactcagtcaccaagatcttcatccgaagaatcaaatcaaggtgcttcgttcgacttgcatgtgttaagcacgccgccagcgttcatcctgagccaggatcaaactctcgttaaaagtgtttgtatccagttcagaaccaactaactagctaattcttccctttttactgttgttttggtttgtttaaaaaccgttcttaaaaatcttctcttaaagaaattttcaagggttgttgttgtctattgttcagttatcaaggttctttgtttgtgtcgttctttccaagcgacagcttttatattttatcaaaagcttttgtctttgtcaagaacttttttatttttttctttcactgccgaatccgtttaattacttctcactagcagtgtatttatgctatcacattcaaacttttctgtcaaccactttttaaaatttcttataagtttttatcatctttacttataaatcttttcttcgaactttttctctctcagggactgtccgcctccgcgccttcctcttattcaagcgtctgttctgtagttttcagtgccgttctcagcgacgaatgttatcttatcatagtcatttctaattgtcaatgttttttatatatttcatgcaattcagaatattctgaaaaattagcatctgcgttccccaactctaacagattttgcaagcttgcttgcaataaactggtaggattggggaacatagggcgaatgcccttaaccgaaaggacgtcagttctttcggttgttgcagatgcgtaacatacatttcaaaacacgacagctattgcaagcttgcttgtataatatactcatttcatgttaagatagtatcagctttatatatgaaaggattttctcatgcctggttttattttacatttaactgcagcccagatgctgcgaagccatcttcacgagtaccctgattttccttatccgattcaatctgtaaatgattttctgatcgggaatcttctaccggatgcgacagaccaaaaagatctttcacatttccggaatcctgtttatcgtgataagatgatggtatttccggatttaacacgttttattgctaaatacagctctcttctttctgattccagtgttttgggatattattttcatttatatatcgaccgtcggtttttcaaggattttattccggaaattgttgatttttatgatgaaagtggacaaatcacagatataaaagaagagattgtaaccgtttatatcagaaattttcagacttatatcccttttgaaaaatatcttactgaggaatattattacggggactatacaaagatgaatacttatcttgtaaaccgctatcacattccactcgatctgaacgcacagataataaatccagggatcaatgaaattcagtatggaaatgtacagcaagtcctggattcattgcatggatatctcagtgttaccgtggatgcagtaaatgatcttaaggtatttccacttgataagcttcttgcttcacttgaacaatatacgattgaatttttagctaaccctttatagaaaaaactctattatccctgccatattctaatccggaagagataatagagtttcttattattttacgcgatctctgtcgtactttcgaactgagaattatacagatctgcatagaaaccgccttttgcaagaagttcctcatgatttccctgctcaatgatatctccgtccttcataacaaggatcagatctgcatctcggatcgttgataatctatgagcaataacaaagcttgttcttcccttcatcagattatccatcgctttctggatcatttcttctgtacgggtatcaactgaacttgtcgcctcatccaaaatcaggatcttcgggtctgcaaggattgcccttgcaattgtgaggagctgtttctgtccctgggatacattacttgcttcttcattcagttccatattgtatccacccggaagtgtctggatgaaacgatgcacatgtgccgccttcgctgcctgaatcacttcttcctctgtcgcattcagttttccataacggatattgtcactgatcgtaccatggaacagccaggtatcctgcagaaccattccgaacatttcacggagttcacttctattgaagtcccggacatcgtgtccgtcaatcttgatcgaacctccattcacatcatagaaacgcatgagcaatttgatcattgttgtctttccggctcctgtcggaccaacaattgcgatcttctggccttctttcacatccgctgagaagtcattaatgatgatcttatcttcattatatccaaaacgtacatgctcaaattcaacatttccctgaagattctctacagaaaccggattctctactgtctgatcttcttccggtccttccaggaactcgaagacacgctctgatgctgcagctgttgactgaagcatattcgccacctgtgcgatctgctgcaatggctgtgtaaagttacgtacatactgaataaaggactggatatctccaacctcgatcacatccttaattgtcagatatccgccaaggattgccactgccacgtaacccaagtttcctacaaactgcattacaggcatcatcaaaccggaaaagaactgggatttccatgcggaatcatacagcttatcatttgtttcattgaatacttcaattacttcctcttctttattaaacgccttgatgatgttatgaccaccatagatttcttctacctgtccattcacatttccaaggtatgtctgctgccctacgaaatatttctgtgaatgtttcattacgaatccgatcaatccggcagaaagcggaagaatcaaaactgcaatcactgtcatcagcgggctgattgacaacatcatgataaatacaccaatcagagttgtaaccgatgtgatcatctgagtcgcactctggttcaggctctgtccaagtgtgtcaacatcatttgtcacacgggaaagcacttcacctaccggctttgtgtcaaaatagctcatcggcatgcggttgatcttctcggagatttctcttctcaaacggtaggttgtcttctgagacacccccgtcatcaaatatccctgcacaaaactgcagattgcgctgatcacatacaggcaaagaacagtcagcagaatctgtccgattttaccgaaattcattccgtctccaccggaaactttacttacaagtccattgaaaatctccgtcgttgcttttcctaaaatcttcggtccgacaatattgaatatcgttccacagatagcaaacacggctacgaaaaatacctgtactttgtaaattgccatgtagcggatcagtttcttcattgttcctttgaagtcttttgctttttcattcggtcttcgaccgccatgcattctagccatgaatctgatcctcctttccatctgtctgctcatttaacgctgcttctaactctttcctggacagctgggattctgcgatttcacggtataccggacagttcttgagaagctccgcatgagttcccttacctgccactttgccttcgtccaatactatgatttgctctgcatgcaggatcgtgctgattctctgtgcaacgatcagcaccgtacttccgcttgtcttttcagccagcgcacggcggagtgttacatccgtcttatagtcaagggcagaaaaactgtcgtcaaaaataaatacctgcgggtgctttgcgattgctcttgcaatagaaagtctctgcttctgtccaccggatacattcgaacctccctgtgagatcgggctcttatatttctccggttttgtgtcaataaattctgttgcctgtgcaatctctgccgcctcgatcatctcatcatcgcttccatgtgaattaccaaacatgatattagatgcgatatctcccgagaacagaacccccttctgcggaacatatccaagcttctcacgaagttcatgctgtttcacttcacggatatctacaccatccagcgtaatgtctccggatgtcacatcatagaaacgtggaatcagatttaccagcgtagacttaccgcttccggtacttccaatgattgctgttgtctcacccggcttcgctgtaaatgtaatatcttccagaacatcttcatctgcacctggataacggaaagatacatgatcgaaagtaagtactccttttccgtcttctgggaaatgtttttcttgctttggatcgtggatcattgtctcactcttcaatacttcctcaacacggtctgctgccacagctgctcttggaagcataattgaaatcatacaaagcattaagaatcccataatgatctgcatcgtatattggataaatgccatcatatctccaacctgcatctgtccatcactgattccatgtgctcctgtccatacgatcagaacagatacaccgttcatgactaacatcatcaccggcatcataaatgtcatcgcacgattgacgaaaaggttcgtctttgtcagagtgcggttcgcatcatcaaatctctcttcctcatgcttctctgtactgaatgcacggataaccggaagtcctgtcagaatctctcttgttacaaggttcaacttgtcaacaagattctgcagcactttgaactttggcataacaacaaggaacagcaacaaaactacaaatgcaatgataataaccgcaagtccgatgatccaggacatggatacattcgtcttcataacctgcagcactccaccgattgcaaggattggcgcatacagaaccatacgaagcagcataacgatcagcatctgaatctgctggatatcattcgtacttctcgtgatcaaagatgctgttgagaagtgattgaactcgttgtttgaaaatccaacaaccttatggaatactccacttctcagatcacgtcctgcacttgctccaactcttgatgccagaaatgcaaccataatacttgctaccattccaagaagagcaagtgcagccatctgacctcctgtttttaacagataatgaatctgtgtctgatccatgtccattccaaggtctttatatgcactcctgcagaagctcactgatgcctgatcaagaattgtatccggcatctctgacatctgctcttcaatcttctcaaccattgttgctctctgctcagccggaagcattttcagaagatcaaacatagacatgtcatccagtgacactgcctgggattccgcctgagattcaccttgtggcattccttccggcattgtccggtctgccccttgtggcatgctctgcgccattccctgggacatctgctctttcagcttgtcttccatctgttttgttgtatcacttccggactcgattccggatgtcatcatcattggaatctgaagaatatctttcagattctccatcgtattttcctcttcagcaacagaatctttcaagacataagcttcttttttataagaagtattatcttctgtatatgcatccatcaccgtctgttgatcgtcttctgatacaaacaaaagcaatttttccatttcttctgttgcaatctgtctcggtacatcatcttcaataccgccctgctggattcctacatttacaatatctgatgtgtaggccggcaaggacagatcacaatacgcctgcacaaccagaatcagcacgatcgcaatcatagctttccagtatgatgcagcgtatttgaataagttcttcataatctgcgtatttcctttcctggtaattctctgttactgttcgcaatatgtgtaagcaacaacaactctcttcaagttacacaatttatcactaaccgctgattctcagcgacagtaatctacttcattcactactccacattctctataatctgcaggagcagccggcgaaaaagcatcttctcttccgcgctcattccttcaaacactttttcttccagtttctcagctgtcttgatcacataagcaatgctgtctctccctttctgtgcaagagtcaggcgcatcactctctggtcctgttcatcggcttttcttgtaatgtaaccttcctgttccatcttcttgatcatcgatgtaattgacggcggcgttacattcaggcgcttcgcaagttctttctgagacatggaatcttcctgatgaagggcaaataagatccctgactgggctctgttcaaatcgtattctgcatacaattcctgtgctctctttccgatcaggcgcatactctgtcccatcaatccaagtaatggggcatcctctttatgacacttcacgttcttttccctccttgattattgatacattctacaaaaaaattctgactatcactttttccacagaatgaatagtgaaaattagttagttaattaactaaatgaaaatatagtacttttcacaaagtaagtcaatattatttctattttttcacactttcttaatactttttgcacacaaacaagttagatagttaattaaattcaatatataaaaatgatgaaaccaaatggctgacaccatctgatttcatcactccatcttaaaactcgttactgttcacacaatgtgcgaccagcaacgcatctcgccattttaaatcgcctttggcgatggggcgagatgcattcaagccaaaacatgcatcctccgtgtcaatcagcgaagtgattgacacgggagtgaacaataactaaaactctttctttttcatgactctcatactgtaaatataagaaatgaaccatacaagcagactcagcacgataagtgcaatcgcaatttcaaaatcgcctatcccttctatcatatacaaaatactttcttttaatcccaggttatccatcacaaaagagccaattgcataacaaattgcaaaaacaattaaaattgcaattggtagcactaatcgtcctttctctccttcaaaccttaaccgaattgcaatcgtaattcccgcaattgcctgaaatacaaagattgtgatcaactccattgccagcgtttccggatcaaacacttcttctggctttatgagtacagtgattcctgcacagattactccaatacaccatccacacgctgtcataataaaggaaaaaatatatttttctctaacatatacttttctatttacaggtaaagaaaataaatacatatatccatgattgttttcatcataactaattgtattccccgcatatactgctataacagatgggatatagattgcaataaaagtagctgtcttcttttccgtcagcgtaaaaaataacgccacaaacgctaacacacaaaaaagattgccaccttgccgaaaaaacaaccgaaaatccttttccaaaagtcctctgattcctttcatcacatcccgcctcctgtcaacatcagaatcacctgatcgagtgatccgctttccactacaatttccggataattttctgtataatactgcttctcatttgtcagacaggcaattccgaaattttcttttctctctttcaggatatagtttttatctaaagcctgatactgttcctcgctgactttcaacatggcatacttttcaagaattctatccatctcttcatgaagtacgatctttcctttatgaatcacataaatatcatcacacagatgctctaagtctgaagatatatgtgaactgatcaggatgcttctctccggctcttcttccatatatgttctcaaaatatccagcatcccttctcttgctccgacatcaagaccggctgtcggctcatccagcatcagaaaatctgcctgatgcgtcaatgcaatgatcagattcagcttcgctttcattccggttgagtactcttttaagaatttatccagtggaatctgatatctttcacacatctgaagaaatttttcttcttcaaactttggatacaatttggcaagaactgcctcaacatcttttcctttcaaatatccgctgaaccctgcttctgccaggactactcccatctgttctttctctttctcgtttaactcttgcggtttttttccaagaatctttatctcgccaccatcataagaaatgagtcctagcactgccttgaacacggtactcttaccggctccgttctctccgaccagacctgtgattcttcctttttctacatttagcgaacagtctaactgaaattcgccgtagcttttctttacccctttgatatctaacataattattcgtcctccatgatgagttcaaacaaggagcggatctcttcctctttcattccgcagcgtcttcccttctgaatcgccgcttccaaatccgcctcaacttcttttctgcgctcttcttccatcaactgtgtattcgaagctgcaacataagttccttttccatgaaccgtgaccgtcatgccctccgcttccagattgtcatatgccttctttacggtaagtgcactgatcttcagttcctttgccatcgttctcactgacggcagtatatcattttcttttaattctccggagatgatctgcgccttgatctgctccatgatctgttcatagatcggtaccatcgatgaattattgattataatcttcataagcaacctcctgttgtaaacagtatataacagcacatcactgttgtcaactgttatatactgtttgcttttttattttttagagcaaaggtttattatattactccgttatccattatttttcagcgtgttgtaaaccaaaacacatcttaaaatataaaaaaagaagtttctaacgtaaaattttcatcttatatcagaaacttctttcttcatttgctctatttcattataaccttgcaatgtttcttattactaaaaaatcgccacagcctcattcacactcttcacacccagcagcttgattcccttaacatccttcaccgtcttcatgcacacttccggaaggatacacgtctcgaatccaagcttcttcgcctcagccacacgctgctccggcatattcaccgcacgtacctcaccactcagaccaacctcaccgaacacgatcgttttttcatcgatcggacgattccggtaacttgacacaagtgccatcacgattccgagatcgattgccggctcattcatcttgattccgcccgcaatatttacataagcatcgcaatttccaagattcataccaagtcgtttttcaagtactgccatcagaagattcaccctgttataatctgttcctgctgcagttcttctcggcataccaaagttcgttcttgcaactagtgcctgaatctccagaagaattgggcgtgttccctccatcgaacaggctacaacagaacctgatgcattctccggttttccactcagcatatattcggatggattctctacttctacaagtccattctgtctcatctcaaagacaccgatctcattcgtagagccaaaacgattcttcacagctctgaggattcggtaagatgcatgacgatctccttcaaaataaagtaccgtatccaccatatgttccagcacacgcggaccagccacggttccttcttttgtcacatggccaacaatgaagattgggatacatagtcccttcgccagctgcataaatacattcgtagactcacgaacctgggagacacttcccggtgcggaattcacatcttcactgtacatcgtctggatggaatcaatgatcacaagctccggcttctctttctcgatcacactacggataatcccaagattcgtctcacacaaaagcaacagattctggctgaattcacccatacggtttgcacgaagcttgatctgagtctgagactcttcacctgaaatatataaaatcttctgctgcttcgccatcctctggcagacttgcaagagcaaagttgattttccaattcccggatctcctcctaccagaacgagtgaccccggcacgatcccaccaccaagaaccctgtctaattctttaattccagtcttattccttgtatcatcatccgcggaaacttctgtgattggaaccactttcgcttcattcaccgctctggctgctacagtcgttcctttcgtgatgccactgtcaatcctctcctcgacgaatgtattccattccttacacattggacactgaccgagccacttcgcttcctcatgcccacaattctgacagaagtaaactgttttctttccttttgccattcataatttcctttctgttcaaagcaagcataatacagcttgccaggtttatagattagaaaagggaaaggcgcatcttgcaattcctttccctctgcttttacactactcttgtttctatccgaatctgactgattagcatttgacaactttgattgcagcactctgatctgcgttaagttcaacacttacacttaattttccgcttaagtttgttcccatcttacctgcagactctccggcgataaatacttcatattcgctctccggctcaagttccaatgtaaactgtacgtcttccggtgcggaaactgtgaactcaacttctgtttctgtctctttgaagttctctactgtacttcccggaacagactcataaacgaacattccatttttctccagctttgtaatctccgcaaatgtctttactttataaagatctcctttaaattcaaatccgtccttctttgtcttggatgcaagagtgtaatctccaaagcttaatgttccgtcgttctctgcacgcaataattctttcactgttgccatttttaatttcctcctgggtatatatatgttcctattatatactacttaaaatagtttttctatagattttatttattcttcacatttacaattcgatgtgattttaagattctgtcttcacaaaatgaattccctttttggatgctcctgctgccacatgatccccttcctgaatctctccgttcaggatcgcatctgccagcttatcctccagttctgtctgcaatgcacggcgcagtggtcttgctccgtacttcgcatccgttcctttctccacaatgagagccttcgcagattcacgcagtttcagatgaatattcatctgtgattccagacgtttagtaaactgattgcataacaaagaaacgattttcttcatctcttctttgccgagtgaatggaatacaataatctcatcaattcggttcaggaattccggacggaagatctgtttcacttcgtccatcacattctgcttcatcttcttataatcactcgccggatcttcttttgtcgcaaatcctagcttcttcggttcaacaattgctttcgcacctgcatttgatgtcataatgattacagtattagaaaagtcaacctttctcccctgagaatctgtaatatgtccatcatccagcacctgaagaagtacattgaatacatccggatgtgctttctcaatctcatcaaacagaatcacggaatatggatgtgtacgcacctggtcactgagttgtccaccttcttcatgaccgacatatcccggaggagatccgatcatcttggaaacggaatgtttctccatatattctgacatatcaacacggatcattgcatcttctttcccaaataatgcttctgccagtgcttttgataattctgtcttaccaacaccggttggtcccaggaacaggaaggaaccaatcgggcgcttcggatctttcagtccgactcttcctctcttcacggcccttgcaactgcgccgacagcctcgtcctgtccgatcactctcttctgaaggacatgctccagattcttcagacgctgggcatcactctctgcgagcttactcaccggtacttttgtccaggcagacaccacttctgcaaccgcatctacagttaccggtgggttggccttcgcctgtttcttctcaaagcgtttcttcactgagtctaatttcttctgcactgcatcctgttctttctgaatcagggacgcttctgcaaaatctccccgctcaatgctctcttccttctgcgaagcaagttctttcactgcctgttctaactgcttcagattctctggaacctcatatcccttcagactcacctttgagcatgcttcatctaaaacatcaatcgccttatccggaagattccggtctgtgatgtaacgctctgacagctgtactgctgactccagtgcctgttcttcgatcacaactttatgatgcgcttcgtatttctctttcagaccttttaagatctcaatacactgatcctgtgtcggctcttcaatcgtcaccggttggaatcttcgctcaagtgctgcatctttctcaatgtacttccgatattctgcaatcgtagttgcaccgatcagctgcatctcacctctcgccagtgaaggtttcagaatgctggatgcatcaatcgctccttctgcgcctccggcaccgatcatcgtatggatctcatcaaggaacagaatcacatttccacaggcttctacttctgagatcaggcctttcatacgctcttcaaactcaccacggtactttgaaccagcgatcagtcccggaagatccagactgtaaatcttcttatctttcatcttctccggaaccacaccggatgcgattctctgtgctaaaccttcaataattgctgtcttaccgactcccggttctccaaccagacatgggttgttctttgttcttcggcttaaaatctccatcagacggtaaatttcctggtttcttcccacaaccggatccatttttccttctgccgcacgttctgtcagatccgtacagtactgctccatcatcgcaccgcttccgcgattatcctcctgaagttcttcctgatagatcttcggatcgatccctgctgcattcataatgctctggaataatttctgaagattcacattcaatgtgatcagaatctttgctgccacacaatccacatcacgtatcatcgcaagaaggagatgttctgttccgatttccgttgtacggagtcttttacactccttcgcgctgttctctaacagatactggagtctcggactctcttctaatctctttcctttcgctgccggatgttcttctgccggagtgatcagctcatccatcagcttcaggatcttctccgactctactccactgttcgcaagtacctgtcctgccactcctgtatattcttctctcaatgccagaagcaaatgttctgttccgatatacggatgcttcatctctctggcagctctagccgcatacttaagcgcatgctgcgccgactttgtatatgaaatctgcatatatatctcccttatgtctttctacttctctgctaccggttctcgtgcagctcatactcgtcaaatatctcatctaccagcccatgaacctcctgccgtgagatattcttgcaacgccctcgcgcaagtacgatccttaactgctctttcatcgcttcgagctgctgaaatttatctacatcaactgcgatcactgcacctctgcgtttatccagactgatatatccttcccgcttcaacacatgatatgctttgttcacagtatgcatattcactccaaccgtatccgcaagctgcctgacagatgggagtgaatccccttcctgaatatctgacatagcaataccaagaatgatctggttacacaattgaatgtaaatcgcctcatcactgttgaaatcaacttctatcagcatacgcgtagcccctttctctttcgtgtaaaacagatctcctgctgtcttctgtaaaatcgttactgctcacacgatgtgcgaccagcaacgcatctcgccattttaaatcgcctttggcgatggggcgagatgcattcaagtcaaaacacgcatcctccgtgtcaatcagcggagtgattgacacgggagtgaacagtaacgtaaaatcagccgcaggggatattttccacttgttatatctatcctagcacaacctcttgtttgattcaagcaaaaacgcagaagaaaaggaaggttttcttcctcttctcctgcgtaaaacagcactattttatttctcaggaaatataatctccattcttgttccttttccgtactcactatccacctgaactttcgccccatgcagaattgctccatgcttcacaatcgacagtccaagtcctgttccaccccgttctttcgaatgactcttatcaactctgtagaatcgttcaaagattctatcctgatgttcttttggaattccgatccctgtatcactcacgcggactttcggtccttccagtgtatttcctacccaaatggttacatttccattttctttattatactttacagcattttctgtaatgttatagatcatttcatccagaatctgacggattccatgtattttcacagattctcctgtcagttccatatgaatattccgctgagccgctgtaagagaaagacgactgacaatttctctcgtcagttcaaataaatctacatcttctttctcaagctcaacagattcgtcatctagctttgatattttaataatatcttcaatcaatgtcaaaagccgacgtgcctccttataaattgtctcagaaaatctcggaatatcctccggacgcacgagtccattcatcatgatctctgcgtatccggaaatcgaagtgagcggagttttcagctcatgggatacatttgcagagaattctttacgcatattggccacagcttctttttctttattctgcttatccatagcttccaaaagcggggtcatctcctcatatacaacattatccaatgggttttccaaatccagatgaattacaggttccatcagtctgtttgtctgccattttgcaagaaaccaggcaagtacaagtccaatgattccaatccctataaccaccggcaaaatatttaatgaagtccacatcagactatccattgattttgaaacacggagaacgttcccatcatccagaagaaccgcataataatacaattctttgcttacggtatctgacatacggatcttctcgcctgttccattcttcaaagcctgctgtacttcggctctggtcttatgattctccatcgtacttccatcatttctggaatcatacagaacatctcccgtagatgcgatcagcgtcactcgcgttccctgatccacatcatccagctgtgcaagatactctgttcctgacagatcgactgcccgtttgatatacgctgcttcctgtttgatctcaccctcaaggatcttcaggttccgctgatacacaacaacagacatgatcagatatatcggaactaaaattgcaatcagtataaacatcatgcttttctgaattcgttttctcactttctcatatcctccagacttgtattacgcttctccaccgatccgatatccaacaccacgaactgtcttgaccagactgccctgctcacctaacttctggcggagtgtccggatatgaacatcaaccgttctcgtctctccatcaaaatcatatccccagatctctgtcagtagctggtctcttgtcagcacgattccctgattgcgcatcaatttctcaagaagttcaaattccttcaatgtcagcacaacttgctcgccatctacttttacttcatgtttcttcgtatctaagctgattcctccaacagaaagtttcgtcttatcctgttgctttccacttctgcgaagcactgctttgattctggaaatcagctccatcataccaaatggtttcgtcacataatcatccgcaccggaatccaatcccactaccttatcatactctgaccccttcgctgtcaccatgatcacagggatatcctttgtctttgatgaatttttcagtttcttaagaatctcaagtccatcttcccctggaagcataatatcaagcaaaacaagctctggcgtgtcaaacgccaaagcctccataaatgctgtcccgtctgcgaatcctctggcttccagtccggttgtctccagagtgtagattacaagttcgcgaatgttatcgtcatcttctacacaaaaaatcatatatttctttctccttctaatgcattacagcactatccttatgcactccggtaattgcaaattctacccactcggcaatatttgtcgcatggtctccgattcgctcaagatactttgtaaccatgataaaatcaaagagttttcttccatcacgaccatcaccctcacggatcagctggatgatctgatcccggatctcatcaaaataatcatcaatctcatcatcatcattcatgactgtacgtgcaagctccagatctttctcaacatatgctgttacactgttgcgaaccattttgcttacgcctgttgccatcgctgtcagcttgtcaagattctcatccatcttctcccacttggatgaaatgatgatctctgcgatatcagaagtctgatctccgattcgctccatatctgtgatcatcttaagtgctgctgagattcttctgaggtctcttgcgaccggctgctgctggagcagaagcttcagacaaagtctctcgatatctttttcaatctgatcgatctcttcatcttctttgatcacaatcttagcctgttccgtgttaccttcctttaatgcctgagttacctttgcaattgctgtttcacacaactcacccatatgtgtaagctgtgtatccaaaagatgcagctgcatatcatatctgttacgcataaatcaaccaaacctccctgtgatgtaatcctctgttctcttatcttcaggaatggagaacaatttctcagtgtcattatactcaatcacttctcctaagaggaaaaatgctgtgttatccgatacacggactgcctgctgcatattatgcgttaccataacgatagtataatcttttttcagttccatcgcaaggtcttcaatcttagatgttgagattggatccagtgcggatgtcggctcatccatcagaattacttccggctcaactgccagtgttcttgcgatacaaagtctctgctgctgtccaccggaaagtccgagcgcacttttattcagacggtctttgagttcatcccaaatcgctgcctgacgaaggcttcgctcaacgatctcatccagctgagattttttcttgattccggcaattctcggtccgtaagccacattgtcatacacactctttggaaatggatttggctgctgaaataccattccaacacgatgacgcagtgtgatctcgtccatttccttgaaaatgtccttaccgtcgagcagaacatttccatcaatcttacaattttccaccagatcattcatacggttcagtgtcttcagaaatgtagattttccacatccggaaggtccgataaatgcagtgatcttattcgcctcgatcttcatattcacatctttgagtgcatggaagtctccataatgaagattcagatggctgatatcaaatttataatcatttgctttttttgcttccatttttattaattatcctttctacatgccagtcaacgaaatgattgacatagaaattatcagttggcttcctctttcattttctgtctttagtttcctgaattcttcttattaatgtgtcggctcaatgcatttgcgccaatgctgaacagcagaacaagaatcatcaggattgctgctgacaggtttgcaagattcggatcctgtccattgatctgaagtccccagatctgcaatgacaatgtctctgccggacggaaaatattcagcgggcaggttggggatgtcagattccagttgttccagcgcagatctgttcctgatcctgttgtatacagaagtgctgccgcctcaccaaatcctcttcctgctgccaggatgacacctgtcatgattcttgggatacacgccgggatcaacacatgataaatggactgccatcttgttgctccaagtccaagacttgcctgcaggtaatgtcccggcagaccattgatcgcgtcctctgtcgttgttgtgataactgggatcgccagaatagaaactgataatgctcccgcgagaagactctttccaagtccgaaaaacacaagaaataccagatatccaaacaatccaacaacaatggacggaagcgaagaaagtgtctcaatacagattcttagaaattttgtaagaaatcctttcttcgcatacattgccagatagattccggctgtcactccaagcggaatggagaataacaacgaaataaatactagataaattgtattgaacaactggtttccgatgcttccttttctcgcaaaggcaaacatctccggtgttgctcctgtaaatcctttgataattacataagatgcaaatccaatcaataatgtaaagaagaacactgcgatcagataaaacacgccggtcattatttgatttattccacgcgcacgttgtactcgattcatctatttgctcccccttactctttgtctttcttcggtcttgaaaaataatggatcagcaggatgaataacagagataataagaacaataacaatgccattgtccagagtgctgtcttcatctcaccgccctccgttgcatttcccatctgtgctgcgatttctgtagtcaaactctttgttgtggagaataatccctttggaagagctgttgtctgtccaattaccattgcaaccgcaagtgcctcaccgaatgctctcgcaagtccgagaataattcctgaaagaattcctgaacctgctgccggaatgacaactttataaatggactgccatcttgtagaacccagtccgtaggctgccatacggtaatcttttggcacagaatgaatggaatctgctgccacattactgatggttgggaagatcatcagtgccaaaacaatccctgccgcaagaactgaatgtccaacttgtaaatgaaatactttcttaattgccggaatcaggactgtaagtccaacccatccataaacaactgatggaattcctgcgaaaatttcaacgattggtctgtaaaacttttctccgaatttcggcgcgatctcaatcataaagattgcagaacctactgcaaatggagtcgcgatcagaagtgccagaccacatgtacatagagaacccacgataaagatcaatgctccgacagttccacccccctgtgcattatcttccgggttccagtctgtcgatcctaagaattcaaatatggaatgaccaaatatcgtaaatgtaccggatcccttatatataagaaaggctccgatacagattgtgatggcaataacaagcaaaccgcccgctgtcatcagtcctctccatgcatactcttttgtaaacatgttttgtttcttcatattttcaccttttatcagtgaaatgtactgctgttctgatttttcccggaacacacagtacatttcatagcttttcactttatgctattagtgctctgttacagtcatcttagatgcaacaccataaccaagtttctccatctgagcgccatattcatcacctgtgatataatcaaggaatgcttttgtcacttcatttggttcaccctttgtgtacatatgctcgaatgtccatacaggatattttccgctgtaagtattctcaagtgttggctcaacatcatcaattgctactgtctcaacacctgcatctcctgtcagataagaaagtgctacataaccgattgctccgtttgtactctttacatttgtaagaagaactccggaatcatctgtttccatggatgtgttagaagcttcttcgtttccgtccagtgcatatttctggaatgttgctcttgttcctgaagactcaggacgtgttacaagaacgatatcctcatccggtcctccaacatctttccagtttgttgtctttcctgtgaagatggagatcaactgctcttttgtaagactcttaacacctgcttctgcaacatctttgtttacgatcggtgccatagttacaacacatacctgatgatctacaagctcttttgctgctgtctcatccagtttatcttctgctgctacatcagagttaccgatatctacagttccttctgatacctgcttcagtccttctcctgaaccgcctgcatcgattgtgatagatacatccggatgatcctttagaaacgaatctgctgcatcatcagcaagtggtttcagtgctgatgaaccggctgctgtgattgttccgcttaatgagctgtcactgctctctgtatttgtatctgctgcattatctgaagtttcatttgatgaacttccacatccaactgccattgttgctgtcatacctgctactgtaagtaatgcaataaactttttcattttcatgtcaattatctcctttacatttcatacacatttctaatcccactgcattttctttttttattttctgcagccatttatgcttccctcaagcacagtacatatgttacgtaagaaatgtaaagtctgaaatcaaccaaatgttaagtttatgtaaaacaacaacaggtgtttttcggatttgtgcagatcctaaacggagtattttttgtatatcaggaaaatactttcctgatatacaaaaaagagaggcctctcaacctctctcacaaatcatctctttatctgaagcaaacacataaggactacgcccagaattagaccaccgagaaaacagacaatatatccaagaaccacctttcgatttcccctttcacagcttgtcttcctgatgtcattatatgaagctttctgcgaaaatattccttctaatcttcaagtgttccccttgcccaacgaatcagccatagaatactccaggtcagcagcactcccatgatcacaccgacaatattgattcctgcttcatcccactgacagtgtcttcctacgatcagaaccttgtgtgcctcatctgcaattgccaggatcgtacaaagtccgaataccgcacacgccgctttccaggctttcatcgcattcttcattgccagaaccaataatcctgattccatgaaataaacgataaagtgtgcccattttctcagatacatatgcacataatccacactgtcctgtggaaaaaagtgctgttggatccattctgccatcggcagactggttgctgctgtctgtggtccattctggcttgacaaaactaaaagaaggatcagccaaatgattgccggcaaaaatgagatcatcgtcaatttcctgttcttctctctattcgttttcttattgctcttcaaaaatctactcctaactgatatactgctttctttttcgcccattataccatgtagaaattctttgtcaaattttcatttcttgtcttacttatacgttaaacaagtaattcgcaatcccatacatctacgccactgtcctggaacacgccatgcagacgttcatgcagctgctcctttgtcacatctttctttagaatcacctgaatgaatccgcctccaccggctcctgatataaacttcccatcgatcaggtcttcacatacaagaaggatctgatcgatacaggtattggttgtaccggcatccaacatacaggataatttccaatgttggtttaaaagctcagcaaattcgtcaatatctccctgctccagtgcaaaacgcattaacacggcgattgccttcatctcctttaatgccttcaatgattctggtctgcttccgatatagctaccaaccacatcacgcagcagatttcttgcgagacgcctctggccagtataaatcaatgcgaaacgctctttcagttctttctttccctcttccggcatttctatcttctctacaacaagattctgggcaatccccggttttgttgagatcagtttaattccttctgtcagtccgccaacctgatcctgccatccgcctccggtactcatgatctgctccataccaaggacaacatcatagatctctgcatctgtacgctcctgaccaagaaattcaaagattccctttacgcacgctcctgataagatactgcttgttccaagccctgatcctttcggtactccataaacctgggtagaaagatagattcctcctcccatccgctttaaaatctcctgaagatctgcttcttccttgaccgggataattccacaggcgatcaaagctgctttatgcagtgcaaatgaatcatatggattatgacaatcctggatctcagctgcactgtctacagttgtatagactccgatatccttactttcaaattccacatgaagctcatctaatctcttcaccgtgatctgtaccggatagattcctcttaatttcattgcagcattaagaactactccacccttttcattacaatgtggtggtgtatccgtccagcctccgccccagttcacgcgaaccggaagggcgatatcaacctgatcttttacaattctatatcctgcactatccggaagtttcttctctgcttcttcataaattgcctcctggattgttccaaaacagtcattctcaagtgcatcataatgcagatcatcataaatcgttcttgtctttttcatataacaggagactgcatgatagattcgaatcttcaatgagaaatctgcttctgctgcatcttccatcagcaacttaaagatttctttcgatattccacgctttccaaatatcttgagtgcctccgcataatacattccctgctccagttttctgatgaaacaccttgcaagaatacggttttcaagaaacctctcctgatcacaggatgcctcaatatctgctgcattaaaactggaatagaggctcatgcgttcagtctcacgccatctggaaatctcttcttttgttgcagtaccatgtgccatcttgtaaatgatttcagccatatcaagtgcatcttcccagtcatcacacaccggataaagatctgcaaaccacagataggtctcttctcctttccagagttcttctttcgtcactttattctgagccataaactgattcaatgtcgtaccgagaaatgaaacctctcccggatattttcctttcggattatctggtacaccataaatcctgattacttttttcccacctgtcagttcaattccgtgcataacaatctgttccggaatcttccggtccataatgcgcacatgggaaagaacggttccgtcgccgacctcagaattaccaagaatataacaattctccagatatgcttcttttcctatcttcgcacggcttcctacataagcattatgcgctgcaaatccttctttttgcaccgctgaattcacctgcatcttccaatccaggaactcgtaatcctgcacatcttttgttacaagacttctcaattcccttgttgtcccgaaatgaataaattccgccggtgacagacacagcagcttcattgaaaaatgatggatcgcattccagatctgtgtcctgcattcatgcagtgcctcattgatctgtccttctgctgcctctttatagaaatcttctaatgtagaatcatttgcaagcggatataaaaaatccccataaaagctgatccttgcttcttcattacaaaactgcctgaatttcttctcgtctactttgccctctgttgaaatcagacggaacagtgcctgcaacagtgcgctgccaaacaataccgcacctgtatcaagatctacatttcctgcattattaacagctcccatctctcgcagacgctcttctgtctgtttatgaagaaaacactttacataatcatgtccgtcgttcagaaatacgccatgattctttcctgtagctaccggctctttaatggaaattgctgctgctccgtcaaactgcgcatcaatctgaagtggattaaacagaagcaatacatcacctgacaaaacaagcattccctcctggattctggatggaactcctgacattcctacaataaactcatcaaataaagtggaacttcttccatccggcaattctcttggaaccggtgagaaaagcttgccgattgcagaatactgcggcactctcttactgtcaccacctgaatgaatcacaagaattctacgattcttaaaaggattctctctctccggttcctggtctgcaatataacgcatcacctgaaatgtagcgcctcctgatcccacacgttttccctccggatccggaagaaccgcatacgttgtctcctccggaagaagacctttttccaaacggttctcaatctgattccgataagccattgcctgtgcttcatttgatgctgttaatataatatagtcccatttaatgaaactttttttctttaaacttctttcataatcttcccaggaatccagataggactgacgcaggaagagattgttcatcttctcgtatttcattttcttaccccttaacgatatttcttaccttaagtaaatgttcaatactagaatatcacaaaaaaagaagattgggaagttattgtatatttcacctgttcacaacaacttcccagtcttttattttttgcttccgattttctcccccatctttaccaatgtctctgcaccggttgcactgtttctcaccagatcttcatccgtctgcacttttcccggctctgtcaaaagaacgactgtagacccgccaaactcgaacattcctttttcttctccccggtgtacaacagatactttctttttatgattcttaatccgtccaaccataagagcaccgacttccatctgcaaaacggttcccagttcttctgtctgtacaagacaatattcccttgtattcatcttgtaaatcggagcatagtcatttgccaccggatttactgtatggaatactcctctgatctttcgctgtgcagatttcacaccatctgccacataacaatatctgtggtagtcatctaccgtgagacggattatataagctgttccaccttcatagcgtttcgcaagcttttcatccttcagaagactgcggactgtatactgtgtctgtttgataagaaaaagtccatccctttgaatcggacaaactgtcactttcccgtcacaaggactgatcagtacttcttttcttccgtcgatcggacgttcctccgctaaaatcttacgcgtaaaaaagtcattataagaagaataatgtttcttttcatagattgacagatcaatctgattctttctgacaaacgatggaatcaacagcctggacactctgctgtccagcacttttccgccaagtcgggatatcctggaaccaagcaatggtttcagcatcattcttgtcaatgtatgtccatagatatattccaggaatctgtcctgccctgttgttttctccgtcctgtttccgtttctgtctgcataaatcataatctctcctcttacatgaatcttcgtctcaatgtccagactactgcaaccgctactactccgactaatgcagaaagtgtcttattccccggcttttttaatttgaaatccataacaaacagaagtcctacaagaagaaccatcgcatgcagtgcgattctgaaatcacagtgcaaaaatgggcgaagcacaacaagaatcggtaatgcgatcgacatggatgtgatcggcaatccctgataacactttctgttctctgttgtctcatcctgcctgcactcttctgttacattaaaccatgccagacggatcaatcctgccaatacataaaacataagaataagaacaccgacaatcccattcattcccatacaataacagatgatcgccggtccaactccaaaacagacaatatcacacagtgaatcaatctggattccaaaacgtttctctatttctgttctatccttctttgttcttgcaatcttcccatcaaacatatcacacagaccagacagtgcaagacacaatactgcaagatccagatgtccattcaatgacagcatcatcccaccaatcgaaatccacagactgatatatgtaagtataactgtgtaatcataaacacctaacattttatttcccccttgcttttattcttatcagaataactctccttttatttatgctttcttccttaaatttcttcctattgtaaaattcgccacgatcgtaaaaactgcactgatcaataattctgtataatatccaagtcctctgcttaagatcattcccggaatcaaaagtgcacttccaaaaaccggctcaaaaatcatcgaaaacagtttttcactgattcccataccacctggcagtggcagcatatccacagaaaccgaaatcacagactgcagaagaatgatcacgaatgcattcgttccggacagtccaaatgccttatatacaaaccaggttgctgtaaacagtgcgaacctctgaaataatgtaattgcaaatacattgaccagtaccattatatgatctttcagataaaccgctgttgcatgatactgatccatcgatgcattcagtttctcaattcttgtacttttatatcgcatcagatgcattttttccagcagttccatcccttttacaagaatagaacgcgcaagcaccggatgaaatacaaggagcagcatagaagacacacaaaatacatttagtcctgttccaagataaaaaatatggcggatatcatacatatgtgttctgatgaatcccctgccgaagatcataagtccaagaccgatcacaacgagaaccattttataggtaatcgtgacaatcatcaatacaagcgttgataccgggattggaattttctctttcttcatataataaatctgcgccggctgtcctcctgttgcggatggcgtgatacagctgaaaaagaatcctacagaggaaaacaagaaacatttccatttctttagatgaataccaagcgtatgcatcatataaaatataataattgactctccccagataaagataatcacacaggcaacacctggaagcaaccagtataatttcactgttttcagaatttctgcaatctcacttaaatcctccccatggaatactccatagattgttgccgcaaagacaagaaagagaaaaagtacattaaatatcattttctttttattttccattttctcctcctgctttacgaaccagatttctgtaaattttccatccgtttgtccggcagctcacaaaccaggtcagctccgctaccgcaactccaccgatcacatccacaattacatgctgttttgttacaagcgtagaaataaagaccaacactgcaatcattacagatacgatcttataccacaccggtacttttttatctcccctgattccaatacaacagaaccagcttgccatacaatggattgatggaaataaattcaccggttcatcaatctgatataaaaagcgcatgccctgaacaaaaattccgtttcctacaagttctggtcttacatttgttgtcggataaaacacaaaaaacagaaaacaaatgattcttgcatacaaatcagccgtaaagaatctgtattttatctcttcctcccgcaatgatacaagcagataattaatcacccagaaaatgtaacatccaaaataaacaagaataaatgccgggatcaatgggatctttgcatctaatgcaagtgacaggttatggtactcaccggtatctgtcaatctcggtgctccccagtagacagctgaattcaccagaaaaacaattaccggcgggagtaagatttctattattctctttctgtccaaatcccctgtcctttgtctcacttcttgttttctccattcttttccaattttatgatgtaaccagattgctccattgctatgtacttacatcattttatcccactttttcataataacaataggctttggcatttattaaagaaaaaagtgccattctttaaggaacagcacttttttctttagaatttcttcagaatttaccgcaaatgcatttcagggcttacatctcgtcttccctgtatccaaaatttttcatcatataatcgctgtctctccagttcttctgaacctttacccacagcttcaaatttactttgcaatccagcaaacgctcgatctcaaatcttgcagtacttccgatttttttcagcatacttccctgctttccgatgatgatccctttatgggaatctctctcgcagatgattgtagcatcaatatgacacactttgtggttcatcttcatctgatcgattgctactgcgattccatgagggatctcctcattcaagctgtgcaatgctttctcgcggataatctctgccacgatctggcgctccggctggtctgtgattgtatcttcatcatagaactgcggtccgtatggaagatatttcataattacattcacaagctcatccgtattatcgcctcttcttgcagataccggaacgatttctgcaaaatcacattccttgcgatatgcatcaataaaagtaagaacctcttccttcttcaccatatcaactttattgataacaagaataaccggtgtctttaccttctttaactgctcaataatatgcttctcacctgcaccgataaatgtagatggctctacaagccaaagtacaacatccacttcattcaaagaacgttctgcaatattcaccatatactcaccaagtttattctttgctttgtgaattcccggtgtatctacgaacacaatctgaccttcctctgttgtcagaacagtctggatacggtttcttgttgtctgtggtttatttgatgtgattgcaatcttctgtccgatcagacgattcatcaaagtagattttccaacatttggtcttccgatcagtgtgacaaatcctgatttaaaattatcctgcatactttttcctttctttttccatcttaaagtgtctttatttcaaggaacatctctttctgctcctcaatcttctcttcacttccgatcacgcaaagttcatgtgcatcaagtaatgcttgaagtacatcggcaagtgcacggatatctgactgctgtgcatcaaggatctgatctctctcttccctgatcatctcagcagatacatggttcatataaagattcattgatctgcttccctttgcagccggattcatcggacggtcaatattactgattgttccaatgatgaacttattcatatccctgtcatctacattgaagtttttcagataatccacaactccttcgtagatttccattgtcttctccagattcgggtcacggtaagataccagatatccctctccaatacgattgaagctgctcatgcatccgtaagctccgcccttcacacggacattctgccacagataatcatagctcaagatgactttcaaaatctgaagtgctcctgtatactcaacaccacggtcgataaagttacctgttcttgcaacatactgaacttttgaagatgtcttgaatccctcgttgcgtttcacacaatgaatttcacacggtgttgctgcttctttctcttctgtatgaagtgtgtctgcaatctttgcaaatgcttcttccatcggtgcaagaccatccgctgatgaagtataactgatgatcagattatccttgcggaaaatctgctgtgcaatctgtcttaagtttgcaatcagttctgctttcttctcctcaaagttttcctccagttcctttacaacctcataataaccgattccatctgtatcatccttgaacttcgccatcggtgaagtataagacagggaacgaagggctgctgtcgtatgtccggatgacaggaaggacatctgcagtctggatttcaacattgctaagatttctttcagacgcttctcatccccaagatcagattccatcagaatctcacgcatcatagaaaacagaacatccatcttcggatacagtgctttacctttgatttcaaatgttgcacggaattctttctcctttacctttgttacgtctgtgtaaagctccagagaagttccgattcctcctgtgtgtacattgatctcattaaatagttcactgtattcataattctttgtattaataattccaagcacactctgcagaatgctgatatatggaagtttctcctccggaataccggacaggtcaaacaaaagcgctgtgtatccaattccattcgtctcaacttcatggtgtaccagcttcactccgcttgtctcaagctctttattataaatcggtgcgatctctctggaaatatcttcgcgtccgagtacaggaatcttcgccagatcttccggtgccgactcttcttcctgatattcttccaactctttcgttgctttcacaagtgcatcgatttcttcttttgacaaactgtctttgtatgcttgaagcttatctgcaagttccttatccattcttgcagtacgtccacgctccggcttaatgatcacgatagaaccatgtgtattatccaggagatatttctggatcagttcttcaaagtatcctgtctccacctgttctttcaagaattcaaatgtcggaatcgcctgcatgtggataaatggtttcgtctcatcatacagccagctgtcaaacaactgaaggccatacatcaatccacgcggataatttccgaaatcagcctcgcggaaacggaattcatgatagttgattccggcacgaagtgctttcttattgattccatttttcacaatatctttcaatgtatcttcaattacacgaacgaattcttccttctgctctacattcgcattcttagaaatcacagagaagatcggctgataaactccgttgtcataagatcctgagatatccttgccgacccctgcatcgagaagtgctttcttcagcggtgcgcccggtgcggacagaagtgcgtaatccagaatctcaaatgccagatacagtttctcatccagtgtagtaccaatcactttattataagaaagataggtgttatcctcctcactctcttcacttgcgatggaatactcctgaacgacttccttcatctctgtaaatggcttctgcagatgaatctctgaatccaccggttcattctcaaaatctgacaaatacttctcatcaagccatcttaatttctcttccatattcatatcaccatacagataaatatagctgttagatggatgataatactttctatggaaatctaaaaatcgctcataagtaagttccggaattacctccgggtctccaccggactctacggaatacgtattatccgggaacagagagttcagaaccacgcggtcaagtacaccttccggagaagagaatgctcctttcatctcgttgtatacaacaccgctgattgtcaactctccatctggattatccagcttatagctccaaccttcctggcggaatgtcttgtcattctgataaatatttggataaaatactgcatccatataaacatgcatcaggttctggaaatccttgtcattgcagcttgccaccggatatactgtcttgtccggataagtcatcgcattcaaaaatgtattcagagaacctttcacaagctcaacaaacggatccttcaccggaaattctttcgatccgcacagaacagaatgttccataatgtgtggaactcctgtactgtctgacggtggtgtacggaatccaattgtaaacaccttgttctcatcatcattttccataaggagcactctcgctccgcttttcttatgcttcagaagtgtcccctttgacttcagatcagataaatcttctgtctggagcacttcatatgcattcaaatcatatatactcattctttttctccttggtttttgttcttataaatatcaaatttttcaaagattgactattctttagtatatccgatttcactggtaaatacaaggcaagcaagtggaaagaaaactttttaaaatctttttgttactataacaaaaggatgaatccactaaagtcttcatccctttattttacctttattcttctgttcctatcaaaaccttttttccacgaaatgcaaatccataatgtcggattcgctcctttttgattcctctggcaagtagttctgtatcatattctttttcatcaatctgacgcagtgcattctctactgtctgctcgagtgatttttcttttttcatgttctggactttaaactccatcacgattgcatccaaattttctttcaaaggttccattactacatcataacgtccgaatccgctttctctgttcgatgtaattctatatttttcggctaaatccacgatcagtccaagaacaaatccgtggtagaatctctccggttcctgttctttggatggcttattcccggtatcaaaactgctaaaggtctgaagtgcaacctgattcataaactggttcatataatccagatctcctgcaatcaatgcatctttaaaatttccatacgcagaatcttcttccgagaaccagtcttcgatcatcttctcaaacatcagcatcgtctcatggtttgtgattttcagataatattgacgcttaccggttctgttatccatctcataccggtcaactttcaggtaaccgctggcaagcagaagactccagatggctccacgttttcttccaagctgctcaaaaatcacctgttcatccagatctgtgcagattgttctaccttgcaacagatcttccatttctgatttaatctttgcaggactttggcggatcaaattggatacaagtacatttccactggtatctgcccagtaagttccatattctcctgtatccagatattttgtgatcgaccacggattataaatgtctttccgcttaccaaaagaaaaaccatcataccagtaacggatattttccttttcagaagacaatcggttattctctaatacctgaaagacttctttctctgtaaatccaaaggaagtgctgtacttttctgatgttgttgttacaacttccaaattgttcaaatcagaaaagattgactccttactaactcttgtaattccggtcagaagtccccgttccagatacggatttgtcttaaatgtgctattaaataagcttcttataaaatcagccagttctttccaatagtcgtttacatatgcctcttgtagcggtgtatcatactcatccagtaacactaacgcattcttaccataataacgtctcaaataatcacacatatactgtatcgcaattcctgcaacatcatcccccatatccactgagaccgaatcgtaaaactccaggtctctgccactgagaactcccgtcctctttaaaaattcaaagtctgtatataactttgtaatcttatggataacccccattctggttttttcataagttgatcctttaatatctgcaaaactcatgaaaatcaccggataggttccctgaagttcacggaatttttcttctttccagatgtctaggccttcaaaatacttcttgcaatctgaatgattgactgagaaaaaatagtccgtcatgctcataagcaatgtttttccgaatcttcttgggcgggtgattaatgtaacactatcctgattctcccaccattcctttagaaaagctgtcttatctatataaaacatatttttatcagctatttttgcaaaatcctgaattccaatccctattgttttcatatgctctatttcctttcgctgatctatcacttctacctgactgatgaaacagattgtttctacttcttttcattttatcatactttttgggcagaacaaagaacagaattttacagttcatccagttccaattttctaatctccaccttataggttttatctataagttctttcttcatatatatattatctattggaaaacttcattaaaaaacgataaaatttatctataaaagctttggttatgagtggattattcccatcgtttgttttttggaaagcatacgtttaataaaataatctctctacaacagccatccacaaacccaacaataaggagaacgattatggaaattattaaagatttaccggaagtattcgaagaattcgcagaacagcgtcagaaatcatttctcgctgtaaaacagttgaaagacaaaggaatccctgtgattggatcctactgtacttattttccaaaggagattgccatggcaatgggcgcagcaacagtcagcctctgctctacatctgatgagacgattccagcagcagaaaaagatcttccacgtaacttatgcccactgatcaaatcaagttatggatttgcaaagacagacaaatgccctttcttctacttctcagacgttgttgtcggagagacaacatgtgacggtaagaagaaaatgtacgaatacatgggcgaattcaaagaggtcttcatcatggaactgccacaatcccagaaagctgaagtactcgacctttggaaggctgagattctccgcttcaaagaatatctcgaaaaaaaattcgagataacgatcacggaggaacaggttcgtaaagcagttaagcttgaaaatgaagtccgcacatccttgaagaatctttacggagttatgagacatgatccagcaccaatcaaaggacatgatcttttccgtgttctgtacggaagtggttttaagcttgaccgcactctgattgctgatgaagttgacgcactgacagccaagattgagaaagaatatgccgaaggaaaacgtgaagataagaaaccaagaattctgatcaccggatgtccgattggcggtgcaacagagaagattatcgacgctgttgagaataacggtggaatcgttgttacatttgaaaactgctccggtgcaaaatccatcgatcgtctgattgacgaagatgctgaagacatttaccaggcaatcgcagagcgttacctctcaatcggatgttctgttatgactccaaacccgaaccgtctggaacttctcggaagattgattgatgagtataaagtagacggagtccttgaaatgactcttcaggcatgccacacttataacgtagagactctttccatccgccgctttgtaaacgaggaaaaaggaattccatacatgaatgttgagacagattattcccagactgatgttggacagctgaatacacgtatagcagcctttatcgaaatgttataatctggtaactgttcagagtcaagcaaaatttcaaaaaacagctataaaatgcttgcatttttaagaatgtttttgaaattttatttggcggatacgccacaccgacgaaatgcgtagcattttggaggttggctctgaacagtcggctgttctcttgcgagagccgactgtttttataaaggagtttttattatgaactacattggaatcgacatcggttcaacctgtgcgaaaaccgttgttttgaacaaaaaaaagaaattatccaggaattcgttcagccaaccggatggagcagcgtagatacagccgaggaaatccatcaaaaacttgagcttgccggaatcaatctttctgatgactcttcctgctgtgtagcaaccggttacggacgcatctctgttccttacgcagataagaccgtcacagagatcacctgccatgctcttggtgctgtgcatctgtttcaacaaccggacctgaccgtgatcgacatcggtggccaggatacgaagattatccagattgaacagggattcgtaaaagattttattatgaatgataaatgtgccgccggaaccggacgttttcttgaagtgatggccaacacactctctcttcgcccgaatgaaatgtttgatctggcacgcctgggttctgacacaacgatcagctccatgtgtactgtattcgcagaatccgaggttatcggactgatcggtaagggagaaccgaaagaaaatattgcttatgcagtagtaaattccaccatccgcaaggttgccgcccaagtcagccggatgaatggtgatatgtccacattctgtctgaccggcggtctgtgtgaatgtgaatatatccgcgaagctttatcaaaagaacttggaaaagaagtgatttcctgcccggatgcccgctacgccggtgcgatcggtgctgcacttagtgcgatgaagatacggaaataaactgcctattcgactttttgcagctttcggatatgccgccaacaaaaaatgccccgggacagactttaaaatcaatctgtcccagagcaacttatattctttcacttatattcttttatctcaaacttttctcttcgtctattatctgattctgaagatcgggctgatcttcttgtagatcagaaatacaacaagtgatacaacaattcccttcacaaggttgaacggtgctaccgcaaacataacaaatgtagaaaggcttgtgatatgtgagttaactgctgttcccataccaaccagtgcatcaatcggcattccgaatgcttttgcataagtcggaagaagtacgaatccattcacgaagcatccgatcacgatcatcagaagcgttcctgttgccattccgatcagagcgctttttcttgttctgttttttctatagatcagacctgccggtacacagaaagaacatccgataataaagtttgcaatttctccaacacctgctgttgatgttcctgtcataacaaagtttaataagatcttaacaagctctaccagaacacctgccataggtcccattgcaaagcatcctaccagaaccggaacttcacttaaatcaatcttataaaatgtcggtgcaaacggaagtggaatctcgaacatcatcagaataattgcgattgctgaaagcattccgatctgaactaatgcctttacccccagcttcggctgaatcttcgcatctgcgtttgttagtgtctttgtctctgtactcatagtgttactctcctttttctatccgctgtctttatcctaaacagcattttttctttttgaaaaaggtaatcttcacaagaaaaaacccggaaggtaattaccttccgggattcatgttttctgctcttaatggcattctcgcaagattctcaggcaaccagatatcatattcgaatatctctttttctgatcctgcgggcatgaacttcttctctcatccagactttactgtcggtaccggaattcccattctgtaatgccatcacagacgagtcaccagttcagccgcatcatatgcgggtcgcggactataccgccggttgggacttgcaccctaccccgaagattaaattccttttactcttactactatagcgcgctcttactaaaaatgcaaccccttttattgatatttaatatcattttgcaccataatcgatatcacttgtagcactttcgactaatatattgatattccttttttcctactaggtttgtcgtgttcttaataaattttttcaataatgttcattttcggttcaaaagttcatcacacttttttcacaaaatacctctatactataagtgttcttaaaaagaacactttttcataaactttttcccccttgagtcacagagatgtggctcattccttttatataaagaaaaatcctgtcttctcgacaagattttctcatacattctttatagaatacgttttctccatttttcccatagggttccctgaacatactgataagctttatcataaaccaatattgctatctgcccaaccaatacagctgccaaaagcaactgatctgacactgctttctgaaacagcatcgaacggaatccgaaaagacacggaagatacactagattaaagatcacatatttcacaagccagtaaatccccatcctatgtcccatctgtggtcttttcgcaagaaatacccagaccgcttcaattccaagaatatagaatcccatcgcagcaaatgttattacataaaatttgttcggcgtaaccaggaatcctaataaaattgctgccagataaaaggctgcccctgtacgaaggccgaactcacgaataacaatccctacaaaaaatgccgctgctgccaacaaaaacaatgtattcgtctcgatcacgcttccaagtgccatacacacgacagtcaccgcaaggatcaaacctccaaatgccatttgttttgcttttacatgcatgagcagagatcgcctcccatacattcacacaatgtgtccgcaagccataagtcgcaacacatatttcctgtaccacaggaattctgtcctcccggtgcatagcctccaccatacggactgttctgatatcttctgctattgaaatccaactgattcaacagctgacggaactgcatgttatttggttccatatttactgcctgtgccgcgtgatccctcgccagaatctgatttccgattcctgcattcgcacagccactcagataataccacatcgcacttctctgctgaacctgatccaatgtattgattgcttctctataacgtctgctgttaatatagttcgcagctgcctgcagtttgggatccatcgttccatagccataagagctgttctgatttccataagactgatttccataagaataactttcagaagaaccatatccataattattcccgtacgaatttcctccattcgcacgctctctcatgataatatcatacgcttcctgtacttccttaaacttctcttctgcaagatctgctaacggattattcacatttgcatccgggtgatattttcttgtcagatcccggtatgctctctttatctcatcatccgacgcattcggtgacacaccgagcacatcatatggattttttgtcatcattcttttcctcacttttcttcatctgaatcttattataatgattccagactccatcatacagtatatttctcaaaatgtccacgtcaaccagacatggcagttgttcaaaacggactgtgctctccgctatcatcatccgaagaatctgttccatctgcacctcataatccggccgctttgccagttctttcaatggattgtagcgattcttctttctatcttccggcagatcctcataggcatccatcagataaatgaattttccgagatagaatcccatctttctgagcgtcttctcccagatatcctccttccagacaaaaagctccgccattaatctgccaaaacatcctgctgcccggtcaatatccatactattctcacgctcacattctccaagttccctcaaagactgctgaatcaccttgctctgccgcggatatttctctataattttctttgcttttccctgaatcaggctcttcgtcatcagacttgacactttatgatcatcctgccagtcatcttccatatgataatatgcaagcagcacattcatcgccgccgcataagatgtaatttcattccgcaacatatgttgccgcttcactggatgaaccttacagcggtgttcctcatgtttcgcaattgtctcatataaagaagataacagaatgactgcaaatgtcatgtcatacgtcaatgtcatctgccccataaatccataatcttctttcaatgtccggcaaagtccacaataatatgccctgtatttcttcagatcttttacttttaattccggttcacagaccgttacatatccaaacatgcaattcctttctcttctggcaattttcctgactttatctattctaccttattctttccattttgcctatcacatgtctgcaaaattaataaaattaataagtttttaattgttaaccttttatatttttatagttgacaattaacttttcatgaattatactaacgaagaactcaatcgttgccatatttcagacaacgatgttaaagctcgcttgaaacagcgataagtattaagatctaaaggagtaaattgaaatgtcacagaatgaaacttccggcacagttgccgtagacaaccagaaaataagaacaaaacagatggtactcatcgccctgatgactgcagtaacctgcgtcctcggaccactttccatcccgctgccattcagccctgttccgatttcccttacaaactttgcaatcttccttgcaatcttcgttctcggaatgaaatccggaacaatcagctttatcatctacctcctgcttggagcaattggtgtcccggtcttctcctctttccgtggaggtctccaggttctcgcaggaccaaccggtggatatctgatcggattcatcttcctcgcactgatcatgggatttgcactcgatcactttgaccgtaagctcgttcctacaatcatcggaatgatcatcggaatggctgtatgttatgcattcggaactgtatggcttgccaaactgttaagcctctccttcaaagaaggacttatgatgggcgttatcccataccttgcaggagatgcagcaaaaattatcatcgctgcaatcgtaggaccaaaactttacggagcaacacagaagatcagataattgaattaaaaaaacgcccaaacagatactctattggtctctgttctgggtgttttttacttttgtcctcgacttcaatattttcctcgaatccgtccactcgaagcaaatactttcggtttgaataatgtaagtgaggaagtttctttgttgttgaggacacatataaggcaggagcgttccgaatacactttgcagaatctgctaggaaaagtcagacaggaaccctacacggcgagtgttctggcttttccgttacagattgtcaaagggatgaggtagagcgggccggtgtccgatgcaataaagaaacttcctcacgcatcttaatcaaaccaaaatacttacttaaccttaaatccctctcatcgtcagctgaatcctcttcttcttcagatccacgctcatcaccttcacatccacaacatctccaacacttactgcttccagcggatgtttgatatatctgtctgtaatctgggaaatgtgtacaagtccgtcctggtgaactccaatatccacaaatactccgaagtcaattacatttctcacagtacctttcagcaccataccttccttcagatctttcatctcaaggacatctgtgcgaaggattggctttggcatctcatcacgcggatcacgcgccggtttctcaagctccttgacaatatcacgaagcgtaatctcaccgattccaagttcttctgcaagcttcttataatctccgattgtaagaccaagtcctgtcagctgatgtgctgtgatagcatctgcttcgtacccttgcttcttcaacagcttttctgctgcagcataagattccggatgaacgcctgtagcatcaagtggattcttaccttcggaaatacgcataaaacctgcgcactgctcgaacgctttcggtccgagtttcggtactttaagcagttcttttctatctgtaaatcgaccgttttcttctctgtacgccacaatattttttgcgattgcactgctgattcctgagatgtaagaaagtaacggtgcagaagcagtatttaaatctactccaactttatttacgcaatcctctacaactccgtttaaagactccccaagcttcttctggttcatatcatgctgatactggccgacaccaattgatttcggatcaatctttacaagctctgcaagcggatcctgcagacggcgtgcgattgatgccgcgcttctctgtcctacatcaaatttcgggaattcttctgttgccagcttacttgcagaatagacagatgctcccgcctcattaacgatcacatactgtaccttctccggaatctctttcagaagctctacgacaaactgttctgattcacgggaagcagtaccatttccaagagagatcagagaaacgtgatacttcggaataatcttcttaagcagatctttacttgcctggatcttcttctctgttgtcggtgcagtcggataaataacggttgttccgattacctttcctgtctcatcaacaactgccagcttacatcccgtacggaaagccggatcccagccaagcacaaccttgcctgcaatcggcggctgcatcaggagctgatgaaggttctttccaaacacttcgattgccccgtcttctgccttctctgtcagttcgtttctgacctcacgctcaatagccggtccgatcagacggttgtaactgtctgcaattgtctctttcaataccggtgttgtataaggattctctgtacggatcacttttctctcaagatatcttaaaatatcttcttccggtgcttccaccttcactgtcaggaatttctctttctcaccacggttcaatgcaagaattcgatgtcctgcaagcttcgcaacggcttcttcaaactcataatacatctcgtaaacagactctgcctccggatccttcgcctgggaagtaacctttccttttctcattgtcgtctctcggatccaagttctgtaagctgcctcatctgaaatgctttctgcaataatatcacatgctccgctgattgcatcctttgcactttccacgcctttttcttcggaaatatacgcttccgctgccttctcaagcggctcttttgtcttctgcaatgtgatcagtgcagccaatggctcaagtcccttttccttcgcgattgtcgcacgggtacgtcgtttcggacgatacggacgatacaggtcttctactgccacaagtgtttccgctgccagaatctgtttctttaattcttctgtcagttttccctgctcctcgatacttgagattacctgctctttcttctcttccagatttcttaaatataccagacgttcatacagctttctcaactgttcgtcattcagttctccggttgcttcttttctatatcttgaaataaatggaatcgtattgccttcatcgatcagctgtactgccgcatcgatctgccagcgttttacatccagttcttctgtcagtctctgattaatatccattctttttagtcctttccactttcataggcattctgtacctgttcggtcagctcttttccgccgttcgcataccattctaccacaaaagtatcaaagtaatccactggtttctccccactgataatctgaagaaacgcttcattctccagttcctgtaattcctgcgggatttcggcatttacgttttccaaaggcagtgtctgtgcacttcgtattcccgctttctgcagttcccccactgcctcaattcttgatgcataagctgcccagccatttgccgttgtcaactgtccattcaaaaatgatttacatgtatcataataagatttttctagtccactcaattccgacacatcaagcgttttatccaacgctgcctgaatatgttccgttgtccgataaagtgcatcctcataatccacattaatattcagcgggcgggccgtcggatctacattaatggaaaaatagtcattcacctctcttgctgaagcatcatttgcatatctggactgatcaaaaatagcactcacatactttgctacaatttccggatgctcatatcctttgcgtaccaccacatacatccactgatcatacgattcaaaaactgatatcttctgtgtctcattcacttgttctttgtctaaaagatacggtttccactctgcatttgaatcgacactatatgccgcactaagcggattattcggagcccaccaacgtccgtagattgctccgcaatgtccggtttttaacagattatctatgttttccgtctttctcaacaagaatctctggtcgagtatcccatcctcatatagattacgaagctttgaaagtgcttcttttgtttcctgcgttactgacccataaactacatctccactttcatccagaatccagtgacatggcattgcacctgcatgtataaacgctgaatccactccataagtctggtccgccccggcaatcacatctgtactacaggcaagaccaatcgtctgaccgtctcctgctgcatcttgttctacaaatgcacgcactatctccaacgcttcttctaccgtttccggttccttcaatcccaacttctcaatccagtctttcctcaaccagagaagtggagctccgtcatcgatcaccgtattcggaaatgcatacaactttccatcaactgttgcagattgtaagagagaatctccataactgtcatacatttctttgattgtatctgtcgtacactcttcataagtttctgtgaggtcttcaatcatacctgcttcaatcaggcggagcaggttatctcttcccttcacgacaagcacatccggaatatctcgatcttcaatcgctacattgactgcctcttcatacgtattgccatcctgcaattcaaagacatctgcatttttaatattaagcactttcttcagatatctcgtatacgcattgttttcgtacgtatttcccaccgggagattcgaattatttgctcctgcaatcttgccaagtgtatacgtgactgtctcaggatattttccaagcggcgtatgcattgcttcatacatctgttttctttttccttcagctgcttcgcctgcaccagactcactttgagatgcatctgactgttccatctgtctttgactttcttttgattcaaaacaagttccgcaccaaagtatcatcaacaaaattaatacaagctgggctgaaagaattcgctttttcctatcgtttttcatagcacctttgcctccgtcttcttcggaatccggataaagacacgcgttccttttccaggagtgctttctatcttcatctcacctttctctccgtaaagaacatggattctgtcacagacatttcgcacgccataaccggacgactgataggtcaggatctgatctgccttttcctgcgtcattcctgctccgttgtccctgatttcaaagaaaatatgctcattttcttcacgaatcgtcagccacaatgttggatcctcattatctgacacatcgattccgtgatcgattgcattttctgccagcggctgcaggatcagcttcggtatcatataatcattaagaccgtctgaaatctgttcgaccacacggaactcgttatcatgcataaccaactggatcttgaggtatgcacggatattatcaatttcttttgccactgtagtcattgtttcaccacgattcaggcttgttctataataagtagacagtgccaatgtcacataactgatttcatcctcccccgcttcaattgctttccagttgataatagaaagtgaattgtaaaggaaatgtggattgatctgtgcctgcagcgctctcatctcactattctgaagctggatcttactctcatatacttctgagatcaaatggttcatctgatccatcatgcgctggaatgaccgaatcaacacaccaacctcatccttggacttactctgcaccgtaaccttgcgaagtcccatattgatctggttcatattctctgtcaataattccaactgtgacaccatacggatggagaaaacataccctaaaagactcaaaaggagaacactgattaaaattaacggaatatttttaagcaaaagcttatggattgcattttcacttaccgccttcggacgatagatatagaaattccatccggtatctttcattgttctctgtgaaatataatacttatcactgatatccttaagattctcaatattctttggacgatattttttatccatagaacaatccgcataaacaacatttccattatcgtccataatcatgccacctgtattatctgtaatctgactcatgaatggactaagaactttttcataatccagacgcatctccaatactgctttgatcgtatcattatcgtagaattttcgactggcaatgattgatttatttcccccacgagtaatgctccactgcatcagcgttccttcattcagtctggaataccactgttgattctccgcttctgacattggaagaagtgtatctccatgtggcacttctatattgtcagaatacagcgtaatactccgaatctctttgtgatagatggtcggcatctgaagcaacggatctgctactttcacatatttcaaatatttctcataatctgattccatttctgtatcgaaaatattcctgagactttgtgaataggataaataatcgaccagattttcataaatctgtgactggttctcaattgagttcaccgactgctccagtattttttccaggttatactgttccttttctctcagctgattcgtcatgccatattgcatagaaaaagccaggaatacaaccggcaccaatcctgcaatcaacatcaaaactgacagtttcttacggaatttcagattttcaaatcgatggagcagcttccgtatttgttttttcatccgcctctgttcctttcctgcatgcttccggtgtgtctccgaaaaattcccggaaacttctgcagaagtatgagttattggaaaatcctacttcttttgcaattccggagatcttcatattcgttgtctcaagaagttctttcgctttttccatccgcacttcacggataaagcggttcagtgtcactcccgtttcttctttgaacacagcactcaaatatccgggagaaagaaataccattgctgaaagcgtctctgctccaagattcctctcctggtagtgatgataaatgtaactttttactttcgtaatctctgaacggaatccgtcttcctgttcctgtatacagtgttcatattcctgaagtgcttcgtctactatagtgatcacatccttcaggtttttgcaacgatataaccgatccactctcttcgaaagcattttctcatccatttcatccatctgatcaagcaattcttttaaaattccggaaaatacaaactttacatacatatctgaaaactgcttattggcacggtatttatcttccaatttctgaaaatcctgacggagatggggcagatctttatattgaatatcattcgtgatctgttccatgatttcagaatcttctgccgggtctgctttcttctcttcctgcttttctccgtgaaaaaataaatgctgatgtggctggtagaactgctcttccagcattccttccagggctttaaactcctctgccagattctttctatcctcaatttctttactgaccgcaaaataacattcactgtcaaactgatgcgcaaagaaccgatacattttctctacaaccacatgatagtctgtatacttctccgggaacagaaagatggactcatttgaattcagattcacataataaaattctctctgcacctcttccttcagacttgtcagaaaatgttcctcctccgtctcaaaaaaaccattggatgcactgacaagaaccatgcgcgaaaactgtgaaacatcgtcttctgtttcatccgttaatttctcaagttgaacaaaatcctcttcttttcccgaatatagatatctcaggaagaagtatttcttcagataatcttcttttctgttctgctgcttttgcttctcttccttagatgagatattttccatcactcgttgaaaggtcttatgaaattcgttcggatcgaccggctttaggacataatccacgacaccatatcgcagagcctctctcgcgtaggaaaaatcattatatccgctgaaaatcacgatttccatatccggatgatcttctcttactgcttttgtcagttccagtccgttcatgtaaggcatctttacatccgaaaataaaatatctacatgattcgaagccagtataccaagtgcatcctttccattcgccgcttctaaaatctggaagtctccttctcttttcagcagaaaacggattccccttctctccagtttttcatcatctacgatcagtattgtaatcattcccccgcgcctcccacacgctcactttatattttcactatttcttttataacgtccgaaaacagcagggaatgatcactcactctctgctgtcttttttaagtttttataattctattttaattcatctctcagccattgtctatactagcctttgttactgttcacacgatgtgcgaccagcaacgcatctcgccattttaaatcgcctttggcgatggggcgagatgcattcaagtcaaaacacgcatcctccgtgtcaatcagcggagtgattgacacgggagtgaacagtaactagcctttaactgctcctgctacaaccccttcgataatatatctctggcagaacagatagaagatgatgatcggcacgattgcaagaaccaaagttcccatcattgctcccatatctacggaaccatatccacctttcagatactggactgccatcggcactgtcttatattttctctgatccagtacaagtgatggaagcagatagtcgttccagatccacattgcctgaagaattgtaactgttacacaagtcggttttgcaatcggaagtacaactttgaagaatgtctggattggtgtacatccatcgatcatcgcagcttcttcaatctccagtggaatggatttcatgaatccggtaaacataaagacagaaagtcctgcaccaaatccaagatagatcacaatcagtccccatggatttcccatatgaagcatatttgcaatcttagataatgtaaacatttccatctggaatggtacgatcattgcaaacagacaaagcatatataagacttttgtgaactttgtcttcacacgacagatataccatgcacacatggagcagcataagatgatcactgctacagataagattgtgataaacaaactccatccaaatgcctgaatcaatcctgtctgtttaataccacggatatagttctctaatccgacatacatctttccggtcggtatctcgaacggggctttactgatataggcttttttcttaaaggagttgataaataccagtacgatcggatacagatacagcagactgagtactgtaaaaataacagttaataatgtgccatgttttacttttttattcattactgctgcacctcctttgatgttgtcattttattctgaattaatgcgatcactcctacaataatgaagaagataactgcttttgcctgtcctacaccttcccaaccggttcttccatagaatgtattataaatgttcagggcaagcatttctgacatcttgtccggtccaccgtttgtcaatgcaaggttctggtcgaaaagtttgaatccgtttgtaagtgtcaggaaagtacagattgtgatggatggcataaccatcggaattgtaacatatcttaaaagctgtactttatttgctccgtcgatctccgctgcctcgatcagctctccaggaatattctgaatacctgagatgtagatgatcatcatgtatccaatctgctgccagagcatcaggataactaatccccagaaaccatattttgaagaatatgtaagtgttttctggaaatgtgccagaataccgtttaataacagctgccatacatatccaagtacgataccaccgatcagatttggcataaagaatacggtacggaaaatattagttcccttaatcttctttgtcaaaagcattgctaccgcaaaagcgaaaatgttgatcagtaatactgttacgatcgtaaataatgcagtaaaccagagagagtgaaggaaatccccatctcccagtatctttgcatagttgccaagtccaataaatctggcatctgttaccgttgtaaacttgcagaacgaaaggtatacacctaacacgaatggtgcaaggaaacctatcgtgaatgcaatcagcgtcggcaatacaaataccggaaaatatctttttatagctttttgcatgttcttctcctcctgtctctctttctgtaaaaaggtctgtctctttttacacttctaataacacactttcagcctgcccccggtattctcgttggcaggctgcatactatttctctatttcacagcctttttatctgtcggtcctgtgaaaagccttttttattcatttgctgctgcgtattcttcagcccatccatcaacgaatgctgtctgtacactatcccatgtgcctgtgccctgtgcatagttcagaagagcaccaccaagattgttcttccagttctcagatggcattgttgtaaagttccagcttactggtgtctttccagcctctgtgtactcggcatttgcttttacaagcgggttgtccggaaggtaatctgcgaatgttgtaaacggtgttacgaatcccatctgatttgccagcatgtcacgaccttcgtcactctcaactacccatttcatgaaatcaagtgttgcctgaatatcttcttcagaagcgtttttatttacacaccagtagttctctgatcctgtacaaagtccctggttctcttctccatcaactccgatgtagattggaagcattcccatatcttcttctgctacttcgttatctttgatatcattgtaagcccatgtaccattctgatagaatactgcttcaccaagtgagaattcgcttgctgcgtcatctcctgtcttagaagagatcatagatggctcacatgtagagttgttcagatacagatcccagatctgtttgtagttgtcaaggtatgttcccttgatagcatctgtactatcaattccgtctgccttgtactcatagtaaattggcaggtttgcaaggtgagtcttgaatctccagtcagaagaagaatccattcctgctgaagtgaaagctccttctactccaagatcatctttatgtgcctgaatctcttctgcagctgtcttaagtgcctggaagttattcagctcatcgatggatttgatgcttgcatccggcagttcgaagtatttgttcagaagtgctttgttgtagatcagaccataagtctcaataacataagcgattccgtctactgcatcaccatcttttaatacatagtcatcagactcaacatctttgtaaacgtcactttttgaaaggtcatagcaataatccttccatgtagcaagtccaaccggtccgtttacctggaacaatgttggggcctcgtcttttgccatctctgatttcagctgtgactcgtatgttcctgatgcagctgtctgtacatcaaccttaacaccagtttcatctgtgtactctttagcaagttctacccactgatcagcctgctctggtttgaagttcagataataaacttttccggatgacttatctccttttgctgtttcatctccgcctgatgtgcttccacatcctgcaagcattccgcctgccattgaagctgcaagtacaagtgcaagaatctttttcttcttcataatagaatcctccttttattactacttgtctttgtttttcttgatagtgttattatagtaaaaagtgccaaaataagatataataaaattccaagaaacataacactatttcaagattattgtaatttttgaagattttgtgtatgatacaagagttcataaagagtcaaatcagaaagggtgtgtctgtttttatgccatcagacacgacaggatagaaaaagatggatcgtacgatcaactatcagataacagaagaagcggacggcctgcgtatcgagcagttcctgcgtcaccagggctactcctaccagaacatcactcagttaaaaaagatgccggaaagtattttaaaaaacggagtctgggaatatatgcgttcactacttgctactggagatattctcacagtacatattcaggaaaatgaaagttcaccgaatattcctcctgtcgaactgccgcttagcattatatatgaagacgaagatatccttgttgtcaacaaacctgccggaatgccgatccatccatcactgaataattatgagaattctctggcaaatggactaatgtggtattatacagagcaaggaaagccttttatcttccgctgcacgaaccgcctggaccgtgacacttcaggtctgaccgtcattgccaagcacctgatcagttccagcatcctatcttccatgggcgcacgacacgagatcaagcgtgaatatctcgcgatcgtccgtggcagtgtaacacctccatccggcacgattgatgcaccacttgcccgcaccggcagttccatgattgagcgaaaagtagacttcaagcatggagagcgtgcagtcacacattataaagttgtagaagaaaaaaacgggcacagccttgtctctcttatcttagagaccggccgtacccatcagatccgtgtccatatgcaatatttaggattcccacttgtcggtgattatctatataatccggatatggaatacatccaccgccaggcattacattcctggaagctctctttcatccatccgatcacaaaggagccgatggaattcacagcggaattaccgaaagatatgaagaagattcttatttaaagaacactatgtacgaaaacactccccgccacaaatcagggagtgtttttctatctattcttatacactaagcttcttatctgccatccatccactaagtaaaaataccgctacacagattataatgtagtatacaagatatccaacaccaaagaatgaatttcctgctacttccacattcggaagtacattgctgatcagattataaatcttttctattataaatgtaatcacaaagaaagctacgattgagattcctcctgcatattttgaatcccttaaaatagttcgagaaacgattaccgcaagataaccaaccatcacaacctctgtccatccgacaaagatgcagagaagattccagataatctgtgcgatcagctgcccttcgcctgacactcgtataaaaccatctcttatgatcgcaaatacatttccaagttctccgacatactggatcgtccctacaaaacaaagcagtccggcaatcgcataaagtgcaaacacgaaaaacatctgtgcgatcgctacaacaaattttgctccaagaatttcccatacagatttcggagtcatccagatcatatagctttgctttgttttcaaatctctgtttaaaatcagaatactctcaattcccatatagaacactacaaaaaacgatccgactaataaaagcgttgcactgattcccatcaatgcatccttttcaaccagcatacctccaaaaaatgtaagcacacagacagctaaagctaccataacaatcattctcgaagtccgctgtttcttccattcatatttcattaattttcccatcgatactccctccttacatcttctgcagataaagctctgcaagtgaatttcccgttgtcattctctctgtctcaacattcacgacatccacaagctgtccatcttttataaaaatcgcatcctcaataaagctttctacctcttcaatcagatgggtagagatcaccattgtacgattctcatctgcttcttccaggatcaaagcaatgatctcttctctcgctttatagtccacaccgttcaaaggctcatctaacaagagaagatctgcttttctcgccaatgtcgctgccgctttcagcttggcattcattccgcttgacattgcagatgctttcatctcttcattcaagcccaggcgttcaattgtttttctaaactgctctctgtcaaaatcctcaaagaaatctgcataatattcttctacatcttttaccttcatataactatagaaaaatggttccgttgacatatatgcgatggatgctttgtcctgatagctaagcggatgtccctcaaataaaatctctccctctgttggctgtgtcagtcccgctgccatcttcataagtgtcgtcttaccacttccattttctccgagaaggccataaatcgtgccctttttcaacttcaaagtaagctctttaactgcttctttatttccgaatttctttgtgatatttctgtactctaacatcatttctgctcctcctcgtaatcggcaatctgctcaataatctcgcctttctgaaatccaagatcacgcatctcgtgtacaaaattcttcaacagctcttctgccatctccttcttcacattgtcaaacatatactcctcctccgacacaaatgtaccgattccacgcttcgtgtaacaatatcctgccatctccatctcccggtagattctcgccgctgtgttctgattcactttatacaaaactgcaagctccctgttcgatggcatcttctcacccggtttcaactcgccctttaccatttttttcttaagctcgttgatcacctgaagatagattggacttcctgaattatattccatgtaattcctccatttatcttttttgcatttgctgtatcagtgctatagttagatagtacactaggtttttagttttgtcaatataaatatagacatttttctctttgattgatggttattctgacgacagccagtttgattgttttaattttgaattatacacataaaaaatagacgtccttgctttggccagcagacgtctatttttaatactttgctactatgatttactcaatctgccagtcaatcggctcaatcccattcttctccagaaatgcatttgtctgactaaatggcttgcttccaaagaaacctctgtaagcagccagcgggcttggatgcggtgcttccagaataagatgctttggattcgtaagcattctcttcttcctctgtgcaggagctccccacagaataaagacaatcggtctgtcctgactgttcagcgccagaatcgctgcatctgtgaattcttcccatccaatccccctgtgagagtttgcctgatgcgcgcgcacagtcagcacggtgttcaacatcagtactccctgctcggcccattttgtcaggcatccatgatttggaatcgtacatccaagatcatcatgcagttctttatagatattcacaagtgacggcgggatatccacacctttctgcacggaaaagcttaatccatgtgcctgaccgttattatgataaggatcctgcccaaggatcacaaccttcacatccttcagtggggtcagatgaaatgcattgaaaatatcctgtgccggtggaaagatcagttttgtcctgtattcttcgtttaccgtctcaaataatttcctataataaggtttagaaaactctcctttcaatgcctcataccagtctccgttcaaaccactcattttttgtccccctcttctttctgcttcaaccattctttacaatctgacagaaattccttcatttcttaaatactcttttacttctttaatttccaattccttataatggaacaaagatgctgccagcgccgcatctgcaccgccatctgtcaatgcctctttaaaatgctccaacgttcctgctccaccggacgcgattacaggaatcgatacactgtcagcaatcgcacgtgtcagttccagatcatatccagccttcgttccgtcaccgtccatacttgtcagaagaatctcacctgcaccaagggactctactttcttcgcccactcaactgcatcgataccgacatccagacgtccaccgttcttataaatattccatcctgttccgtctgctcttttctttgcatcaatcgccactactacacactgacttccaaacttctctgccgcttcacggattagctccggtctgttgattgcagaagaattgattgaaatcttatccgcaccttctcttaacaatgcacggaaatcatcaactgtccggattcctccgccgacagtaaacggaataaacacacattccgcaacctttcgtaccatatcaacaactgttcctctatcatctgaagaagctgtgatatccagaaatacaagttcatcagctcctgccttatcatatgcctttgcaatctccaccgggtctccggcatcctgaagatcaacaaaattcacaccttttacaacacgtccggcattcacatccagacatggaataattctttttgtaaacattctcgcactcctcctacagctctacaaagtttttcagaatcttcagtcctacatcactgctcttctccggatggaactggcatgcgaaaatattgtccttctcaacagacgcatggatatgtattgtatactctgttgatgccttgacaatctgttcctcttctgctttcagataataagaatgtacaaaatatacataagaattctcagcgattcccttaaaaagtcttccatcattctctaaatgaatggaattccatcccatatggggaatcttatatccttctttatcaggtatccttaagatctcaccctttagaattccaagtccttctacacccggagcctcatcgctgtgctcaaataaaagctgcaatccaaggcaaattccaagaaatggtgttcccttttctgtaacctcgcggattacttcatcaagtcctgactgttttaatttctccatagcatctccaaatgcaccgacacccggaagaatcactttatctgcatgaaggatctcatctctgtccgctgtaactgtaacatcctgtccaagtgcaagcaatgctttctcaacactgcggatattaccggcatcataatcaattattgctatcattagcctacctcttatctgtaatctagtatctattatctagtatctattttctatactttaccacactttgcgtcgagttcaaaccaaaattcgactccattgtcataatttttcacgccgtacccctgatggaaagattccatgattgccttaacgattgaaagtccaatcccatttccaccatattcacgtgtatgtgctttatccactttataaaatttatcccacagttttggtacatcctcttctggaatcggttttccactattaaagacggaaacacatacttttccatccattgaaacgatcttcacttcgatccgcttctcatttccgacatgatgaatcgcattcgtaagataattccgtacaacctgttctgtcttaaactcatctgcccagacataagctgtctcatcagcaataaaatctacattcgcattaacctgttggatcagaatatcacaacttgcaataacacctttcacaagcttcacaatatcaaaccgttcaaattctacttcatctgtcccaaattccaactgattcagtgtcagcagattcttgaccatccggttcatctttcctgcttcatcaataatgacatcacaataaaactctgtactttccgggtcgtcattgattccttcttttaacccttcggcatatccctggatcaatgcgatcggtgtcttcaactcatgggaaacatttccaagaaattcatttctcatattttcaagtttctctttctgctcaatgtcctgctgcagctgattattcgcagtcttcaattcagatattgtcttttccagctgatctgacattttattaaagttctcgcccagaacaccaatctcattctttccgccgctcgtatacttcgcatcaaaattcagatttgccatatcttcggaaagtcttgccagttccaacactggttttgtaatccttcgtgaaaaaatccatacaaggattcctccaaagaacattccgaaaattccaagataaatcagaaactgattggcaagattggcactttcacgaatactgtccaacgggcttcgcattgtgacaaacacactatcacttaagtatccccacatttccagataatccgtaccgctctgtggatcctggattttacgaaccacataatcgtccgaatgcttgagaatcttttcctgatcatcatctttcaggaagaaaatacggagcatctgtttgtacaggaaaccttcttcctttacatttgtaaatacaacctttccatcgtcagaaatatccatcgcgcagacatcaatattcgttttttcaagttccgccacaagtttcttctgcactgcctcatttccaagatttccattgttcactgcttcactcatttcctcatacatctcaatcagatctttctgcttatgagacatataatatcgtccaagaaaccccgtattaacaatgaaaactaacatcagaacaaacactagaagtccaacaaaaatagctgtcatctgtccgctcaacgtatatttcagttctctttttgctttcttcatctgatttatttctccgcgctctgaacttcaaacttatatcccatgccccagattgttttgatatattcgcccttatcgcctaatttacttctcagtttcttcacatgtgtatcaattgttcttgcatcaccaaaataatcataattccatacattattcaatattttctctctggaaagcgcaattccctgattttctataaagtaggtcaacaattcgaattctttataactaagttcgaccggtgttccatcaatcttcacgatatgtgctgacttgtcaatggtaataccgcctgcctccagcgaatcattgccgaccgctcccaaagttctgcgaaggatcgcatttactcttgccacaagaatctttggactgaatggcttggaaatatattcgtccacaccaagttcaaatccctgcagctcatctctctcctcagaacgcgctgtcagcataatgattggcactttagaagtctctcgaacctcacgacacacctgccagccatccattttcggcatcattacatctaaaatgatcagggcaatgtctttatcttcgtaaaaaagatccattgcttccattccatctccggcttctaatactatatacccttctcttgtaaggaaatccttcacaagttttctcattctgctctcgtcatccacaactaatatttttgctctttccatcttcttttctcctaacttatatttgcgtgtaccagatcacttctacatttaattaccttttaatataccaaatagttttgtcaatattgtgaacaacaaaacggtcagtctataaatgtgtgtcaaaacttcatttacagactgaccgtctcttcttttattcaagaatgcctccggcaggattattcaaactcatagttagaaaaacattcatttgcctcttcttcatcctgtccattcacaactacacgcattggcagtcccagcttaatagacattaaccccataagggatttaccatcgatgatataatttctgtttgccatatcagttacatcaacgtctgattttaatttctgacaagtgttgcaaaatgtcatgatctgccccgctgacataaacttcactttcttttctaccatgttttttacctccatctgtctatcgaatacgagtaataataaaagccaacacagaaatctgcacaatgcctgaatgcagattactgtaatttcaaacattctcgactagtatataccacttattccggaggtgcaagtgaattttcgatttttttcgacatattgtctaccttttttgatataaagttctcacccggagaatcttgacagccactactgtcacttctataataattgatggcttattattactgctttccgccagaaagcagtaattcaatcatgacagtaggtactacacacgaaaatgaggtgatatctatgaaacacaaatttcaaatttctgaatctatccggcttggagcaatccttgcactttccggtggattcatggatgcttactcttatatggagcgtggagaagtatttgccaatgcacagactggaaacatgcttctctttggggtacatctctctcagggagacttccagaacacaatgaaataccttttccctgtactcgcctttgcacttggaatcgctcttgctgaagttgtccgggctaaggcaggaaatctgcttcactggagacagatttctgttctggcagaagcactgatcctgatcgcagtcagtttcttcccaacagcattgaatcttccggccaatgcattaacttcttttgcctgtggaattcaggttgaaagttttcgcaagattcatggcaaaggaatcgcaactacaatgtgcatcggtaatctgcgcagtggaacagagaacctgcaccactatttccatacaaaagaacgacattttctggatacaagtcttctgtattacggaatcattgcctgctttattgtcggcgcagtgatcggtaatgcagcagttcagctgttccagacaaaggcaattcttggatgttccttcttgttattaatttcattctttatgatgtttattgattgggaaaagaaagaaaaggagcttgcactttaatgtgcggcttcttttttcatactggttttcagatagaaaaaatcccaaaagtgcaatgttgatcagcacttccgggaaaaaatttactgcggatgacaggacttgaacctgcacgtcgtaaacaccagaacctaaatctggcgcgtctgccaattccgccacatccgcatatttcttattcaattattgattaagaaaaaaatagaacaagcgatttgcttgttccagtgagcgtgcggggattcgaaccccggacaacttgattaaaagtcaagtgctctaccacctgagctacacgcccttattcatttttatttctttcctgctagcaggataactgggctagctggattcgaaccagcgaatgcaggagtcaaagtcctgtgccttaccgcttggcgatagcccatcgaagacttcatatctgacactgcacggccagttggaatatttaaagaaaaaggtggatagccggactcgaaccggcgatatccagaaccacaatctggcgcgctaaccaactgcaccatacccaccacaaaacgagcctggggggattcgaaccctcgacctacggcttagaaggccgttgctctatccagctgagctacagactcatttctctcttaatgagaacctctcgttttcaaacgagaagcgggtgatgggaatcgaacccacgtatccagcttggaaggctggtgttctaccattgaactacacccgcaggatgatcggggtgacaggattcgaacctgcgacctcctggtcccaaaccaggcgctctagccaagctgagccacaccccgatatcagttttatttccttgcccctgcggctttgtgtttctttcgtatctcccgcagcgacaagatatattatatggcatgtttctcagaaagtcaacaggttttttaaagtttttttacttttttacgactgttttttacctgtttttttgcaagaagagtgcgcaaattgtttcttttgttttagttttctgataattaggataattatagatatttttgctcaaaactcaattttccgtccacatcgacttccatgatcatatagctgcctcgtcttccctcctgacgtggaaaagatagacttcccgggtttaaaattgtcattccatccttctgaagaaagaaaggacgatgtgtatgaccaaacattacgagatccgctcctcttgttctgccctcttctatgatagtttccatccccatggacacataataataatgtccatgggtaataaatgcatgataagggccaatctcaaactcctcttctctcggaagttctgtaaaaaagtcgttatttcctcttataatatgcttctcacactctacgacagcctccagatagtcttctccaccttctacatctccaagatggataaacatatcaattttcccagcctcttctaatgcgcggtccagtgcctggtgtcttccgtgtgtatcactgacaatcagaattttcatgcttcttcctcattcaatttctcttccagcaggatttttattgctcgaagtgcttttcctctgtggctcaatttatttttctgctccggtgtcatctccgctgttgtacatccgaattccggaacatagaagatcggatcatacccgaatccattcgcaccgacaatctcgtgtccaatttgtccttcaatcgtctcacggactacgcttgttgttccatccggaaatactgctgcaaccgcacagacaaatcttgcagtacgctcatcgtccggaaccccttccagtctgtccagaaggattctgttctttatatcataagaagtatcctctccggcaaatctcgcagaataaattccaggtgccttatccagatagtcaatctcaagacctgaatcatctgcaagaacaatatcgttgaccagcactcgtgatacagctcttgccttgatctctgcattttcttcaaagctcattccgtcttctacgatttcttcatcgactcctgcctcacgcatcgatacgatctccataccaagatcagcaagaatcatccggatctctttcatcttattttcatttcctgttgcaaatacaattcttctcttcattttgctttctaccttctattctttttcaccaacaatctggtacagcgtttcttatttcttcggtctcggtggctttggtccctggaactgatagaaatatgttttcagcataccattataaatcttacggttcttatctgcttttcttccgaaataacgttctgcgtcttcataacttgtgatcatgtatgcagaccagctgtcaagtttcctaaagctctcgccaaattcacgatataaaccaggaagtgcctctttctcctcaagacgctctccatacggcgggtttgttataataaatccatatttcttcggatgactcagtgcactgaccggtctctcctggaaatggatcagatgatccacacctgcattctctgcattctgtcttgccatccgcacaacatccccatcaatatcatatccctggatatccgtctcaatctgatcatcgatcagatcattcgcctcatcaatggcctcataccagagtttcttatcaatcagattcgcccagctctcagccgtaaaagaacgattcattcccggtgcaatatttgctgccatcattgctgcctcaattggaaatgttccacttccgcaaaacggatccactaagatacgctcttttctccacggtgtcagcataatcagtgctgctgccagtgtctcagaaatcggtgccttgccggctgacggacggtatcctctcttatgaagagaatctcccgatgtatcgattccgatcgtaacgatatccttcatcaaaaatactctcagtggataagaagctccatcttcctgaaaccactgtacatgatatctgcttctaagacgatctaccatcgctttcttcataattgactgaatgtccgaagggctgaacagcttactctttaccgatgaagctttcgccacccagaacttcccgttcttcggtatataattctcccacggaattgcttttgtcttctcaaacaattcatcaaaggtaactgctttaaaacttcctgccttgagcagaacacgttctgctgtacggagaaatacattcgctctgcacgctgcatctgctcctccgtaaaaggtaactcttccatcttccacctgtgcgatctcatatcccagatcctgaatctccctttttaatactgattcaagaccgaaatgacacggcgcaatccattccattctttccatatctacctcatattatctttatgtacttattaattactgttaactgattcttattttacagtatcataattttactataaatgaaaggcagagtaaagtgcgattgcctttcttctctgccttgttactgtttataagaatcttattcgttactgctcacagtatctgttaatatctgtctgactcatcataatcatcttttccgccatagcagtcatctgcatttttagaattgcagtttgtgctgttcttactctgatttgaataagaatttttactggaattcttattcgaacctgaattagatgttgaatttctgttcttactctgattttcttccttcgatgaatagaatccattctgagaatttttacttgtgttgctataattttttgccatgatacttcctccttatttggtgttactgttcttattaactgacagtaactatttagtacaatctttattatcccaaacggaggtctttttatgcattttgtttcaaccatattttgaatattttgcttgctttttccaaatgcatatattatactgattcatgtagaaagattattttctacaaccccttattaattatttatactcccctcaaaagaccgatggctcccccatcggtcttttacttttcttttttctaatatcgtcggttcccaccgatcagtctgatcacgatcataatgatcagaagaggaacaagaaccggtgccagaaaactgatgattcctgttataacagacacaactactacgactacaaatacaactgcaaggatcagcaaagccttcttccaccaggtatctaatctgaactcatgataggatccataagaatgctctgttccatattcatccttctgtccataaccagtatagttgttctgtgcctgcgttgtctggttgtacgaattattgaatggactcctgttctcataaaccacttcttcgtctgttccatcacttgcatctacaatggttttcgcaattgcccacggatctccgagcagttccaagacctcctgctcgctctttccttttctcatttcttctataatataatcatcataaaacttaagatgatcctgaattgttgcggcatcaagctttccattcaaagcctcctgtaattttcggataaattcctgtcttgtcatattcaactgttacctcctgttccgaaggttactgttcacacgatgtgcgaccagcaacgcatctcgccattttaaatcgcctttggcgatggagcgagatgcattcaagtcaaaacacgcatcctccgtgtcaatcagcggagtgattgacacgggagtgaacagtaacttccgaagttctctttagatgtagaataccacactgccattcttttttaaaccgttattttccactacatctgtcgttcataatttgttcatttatcatttaaaaatctttcatcttcttatcactttttcttcatttctctcacatatactataagcatcaaaggaaaaaacaaaaaactttgaataaactttttcataatacatgccgggaaccagtaaatggttacccggcatcctcccttttatggagacttttttcttattccggaacaaccggatcatttatcacttcttgtttcgtttcctgttgtatttcctcttctacagatttttccacagtttcctctgtttgctgttctgtcgtttgctctgtttcttccttgttttccccgttattctcttctttcgtcgtttcttctatcttcttttcacatgctttgaccgattccagaatctcttgaacccgttcttccatctctttcttccatttcatatcttccaatgctttttttctgtcctgttcagttttactatgttcttctggtattacttttacatcgtctgctttctgagcttgcactgccgtttcactttttccaactgtattgttgctttctcttccccggctcatcccaattccggctgccgcaattactgccccggcagcaaataaaagaaccgccagtttgacattccgaagttttactttctgttccaaattccattcctcgcgttcctccggaagatcacgtatcacctggctgatcttatcataatgccgtcttccgccaccggtacaacgttcaatgatccgctccagtctgcgttcttcacttctgctaagttccgggatctgctctgtatatgccagtaaaaactgcaaaattttaccatatccgaacaaatctacggaacaatttttcttgctgcctgacgctgtcgggcggataaaatgacttctcaccgctttctgctgcatcttcttcataacaaattcattttcctgtgcatccggatttaaaagcagcaattctccttcttctgtcacaacaatactatatggggtcagacaacgataattctgcccacgtctcgactgctgatactttcttatttctccggcaatttgtcggaaccattcaaataacaccgctttatccaactgtgtattatcccgcagataataaatcaaaagttctccctgcaggcaatcgatacttggctggcattcggttcctttttccacgaagcgaagtacttcatacattttttccatatttaattctactgcaatctgtcgtctaaacgtgtgcggccccacaccgcacacgatacaatacctgtccaattgaaaattatcagaatctgatacgaactactcttcagaatctttcctgattcttcagtcagaacgactgaagtgtgactctcatattaattgaattcttccagtctgtcaagagctgcggcaacaactttatccatgtcataatatttataatctcccagtcgtccgccaaagattacattttcttccttttctgcaagcttcttgtattcttcaaacaatgcattattcttctcatcatttaccggatagtatggttccatgccaacactccattctgatgaatactctctggaaataaccgtcttctcctgcttgccaaactcaaaatgcttatgctcgataattcttgtatacggaacttcacgctctgtgtaattgacaacagcatttccctgatagttctcacaatcaagaacttctgtctcaaatctgacagaacgatactccaatgctcccagctgatatccaaaatattcatcgatcattcctgtaaaaataatcttctctgcaatctccggattctcttttctgaattcaaagaaatcaatccctgtgcgaacttctgtcccttccagcatcttctcaacgattgctgtataaccgccaaccggaattccctgatatctgtcattgaaatagttattatcgtaaacaaagcggaatggcagacgtttgataataaatgccggaagttctgtacactttcttccccactgtttctctgtataacccttgatcagtttctcatagatatctcttccgccaagaaaaagtgcctgttcctccagattctgtggatctgtgattcctgtctctttgcgctgtttttcaataatctcttttgcttcctgtggtgtgcggatattccacatcttactgaatgtattcatattaaatggcaggttataaagttcatctttataaactgctactggtgaattgatgtaattattaaattccgcgaactgattcatgtaatcccatatctttttatcagacgtatggaaaatatgtgcaccatatttatgtacatggattccttctatgtcctcacagtaaatatttcctgcaatatgatctcttcggtcaatcacaagacatttcttcccttttttctttaattcatgtgccatgacagctccataaagacctgctccaacaatcagataatcgtattctttcatttactccttctttccgcagaacgattgtctggatccggtaaaattcaaagatcaacctttctgccttctttcttttcatgttacagtgtgtttatgataacacattttctaataaatttgaatctctatcaaaaatacggtatacttaacagcaaaaggaggatgaattatgcttataaaaaatggttttctaattgatcctgcatctgatacagaacgtcttgtcgaccttcgcatcacagacggtctgatccagaaactcgcagatgccggaactctgacacctgaaaatggagaggatgagcttgatgctgcaggacttatgatttctccaggacttgttgacacacacattcatttccgtgatcccggatttacttataaagaagatctccataccggatctcttgcagctgctgccggtggatttacttccgtgatctgtatggcaaatacttcaccagtcatcgattctgttccagttctcaaagaactgatggaacgggaagctttggaagacatccatattttccaggctgctgctgtctcctgcggactcaagggtgaagagatgacttctatgaaggaacttgccgctgccggtgcctgtggattcacagatgacggaattcctcttaagaatgctgcctttctctataaggcaatggaagaggcgaaggcacttgaccttccgatcagtcttcatgaagaagatcctgcatttattgaaacaaacggaatcaaccacggacctgtatctgatgcgctgggcatctacggatctccttcgattgctgaagaatctcttgttgccagagattgtctgctggcgcttcgttccggtgcacaggtcgtgatccagcatatcagctccggacagtccgttgaactggtacgtacctttaaagctatgggagcaaatctgcatgcagaggcaactccgcatcatttcactttgacagatgaagctgtattaaaatacggcgcacttgccaagatgaacccaccgcttcgtacagaaaatgaccgccttgctatcatcgaaggtctcaaagacggtacgattgatctgattgctacagaccacgcgccacacagtacggaagagaaatcccgtcctatcacacaaacaccaagcggtattattggtcttgagacttcccttgctctcggaatcacttcccttgtacgtccgggacacctgacattaagccagctgattgagaagatgacgatcaatcctgccagcctgtatcaccttccgtgcggttctgtcgcagaaggaaaatcagctgatcttgtactgtttgatccgaatgagaaatggactcctgagacttatgcttctaagtcttctaattctccatttaccggatgggaattgtatggaaaagtaaaatatacaatctgtgatggaaagattgtatacaaggattaatccaaaaggtcccctgcagaatctttcatttccgcaggggacctcttctttgctcattaatcctcgatcgctgttactgtataatctttgtcttcgactgtctttttcagcacttcattactgatttcggaattcagtgtcacaaccgctgttccggcctcatggctgacttctgctgtatcaacctgctcaagtgcgtgctcgagagctttcttcacagccgcctcacagtgtccacacatcattccttcgattttcattgtctttgtcatctttgtctcctccttgttttctgactcatttttgtctgctaagacaatatctgaaacagtattttctgctgtttctacctttttcatctttctttttctgtctttgctggcatcgtacattttaaacagattcagtctcaatgcatttgttactacacagaaactggacaggctcattgccgccgctccgaacatcggatttaatttccaaccaaagactgggatccagattcctgctgccagtggaattcctatcgcattatagaaaaatgcccagaacagattctcatgaatgttgcgcaatgttgcacggctcatacggattgccgccggcacgtcacttaaccggctcttcatcagcacaacatccgctgcatcgattgcaatatctgtccccgctccaatggcaattcccatatctgccctggtcagtgccggtgcgtcattgataccgtcacctaccatcgcaacctttcctttttctttcagcttgcggatcacctgttcttttccttccggaagaacacctgcgatcacttcatccacacctgcctgctcaccaattgccttcgctgtgcgctcattatctccagtcagcataacaacatggattcccatattctgaagttctttcactgcctgtggactatcttccttgatcacatccgcaactgcgatcatgccaaggaactgctcattccttccaaagaacagcggtgtctttccttgctgtgccaaccgttccgcctgttcttttatgctggcagaaatcttcattttgtcagaaatgaatttaaaattgcctccgtacagccagtcctctccaagttttcctgacagaccatttcccggaacggcctgaaactgtgtgatttcacttttctgctctgcttccccattttcttctgcctttgcaagaattgcccgggcaagcggatgctcacttttcttctccaatgcatttgcaaaaaataataattcatgttctgtcattccgtccgcagggagcagatccgtcaccttcggttctccacttgtgatcgttcctgtcttatccagtgcgacaatctccgtctttcctgtctcttccagcgaaacagctgtcttaaacatgattccattcttcgcacccattccatttccaaccataattgcaaccggagtggccagacctaatgcacacgggcagctgatcaccagaacagaaattccccttgcaagtgcaaatccaacaggctctccgacaagcagccatacgatcattgtgacaactgcaatagaaataactgccggaacaaatactcctgaaactttatctgccactttggcaattggcgcttttgttgctgccgcatcacttaccatctgaatgatctgtgataatgtcgtatcctcgccaactctcgtcgcctcgcaacgcagaaaacctgactgattcattgtagccgcagacactttatccccttctgctttatctaccggtatactctctccggtcagggcagcttcatctactgcactgtttccttccagaacaattccatccaccggaatattctccccaggtcttactacaaactgatctcctcttctcacctgattgatagaaacttcctgttcttttccatcacgcaggagcgttgctgtctttggtgccagcttcatgaggctttttaatgcatctgttgtctttccctttgaatgcgcttcaagcatctttccgactgtgatcaacgttaaaatcattgctgctgattcaaaataaaattcatgcatcagctccatcacatgatccatatcgcctgccgtctgcgctgccgtcatagcgaataatgcatacacgctatatccataagatgcacctgcaccaagtgcaaccagcgtatccatatttggtgctctatggatcatgcctttccatccactgataaaaaacttctgattgatcaccataacgattgtcgttaacaggagctgcgccagccccatcgccacatgatttccttccagaaataccggaagtggccagccccacatcatatgccccattgacagatacatgagcggaatcaaaaaacacaaagaagcgatcagacgccttttcatcttcggtgtctccctgtctttcaacgcatcttccgcacagttctgctcactttgattcatcccatgcccttcattctttgcagatttcaacgttgccccatatccagcttcctcaacagccgcaatgaccgcatctactgttgctgtgccttccactcccatggaattcgtcagaagactgactgaacagttctcaactccggggactttcccaactgccttctcaacacgggcactgcaggctgcacaactcattcccgtcacattatattgttccatcttactcctccttcaagttgtgatccggactttttgtgccagatctctcttcagatcttttatcgcatcaatttctgaagtgtcgtcacgagctcgtcaatcgtttcatcttttccatcccggatatcatctgccacacatgtccggatatggtttgccaaaagcactttgttgaaactattcagagccgcattcaccgcagatacctgaatcagaatatccggacaatacgcgccttcttcaaccatccttcgaactcctctgacttgtccttcaattctactcagacgattcatcagatctttatattctttttccgggcgatcctttgtcttgtgacaacatcccggacagactttcttttcttccattgtatttctcctatcgtataacccccagggggtatattttctaattattaatatataccccctacaggtatatttcaagtgctttttaacaaaaagttactgttcatgctacgtgcggttgctgcttacgctatatgcggccgtcaacaacaaagaagctgtcatggaacatttcacaattatatctatgttccatgcagcttctctgcaatccattattatgttcgttattatatttcctgacaaatctgtcttattctacactcttgagtgattcaaccatgttaatcttctttaacttaaaatacatcactccattgacaaacaaagaaaaggccactgtcaaaagaaaggcatacaggaaacttggtggatcgatatttcgtccaaacataaccgaatcaatctccactgtctcaacaataaagcggtgcagaatttttccgatcaacaatcccgccagtgccccaatcaaggtcagcaggatattctctctgtaaacataagaagaaacttccttgtcataaaatccaagtacctttaatgttgccagttctctcttgcgctctgtaatgttaatattattcagattatacagcactacaaatgccagcattcctgctgaaataatcaatacaataatcacaatgtccagactctccaacatatgatccacctgctttttcaggcttgtcgtatagctgatgctaagtgttccatcacacttcattacattttcgccgacatcctttgcctcctctgttgtacgatcctgagttctataataaattgaattataggccggagcctcaccgaatgtcttttcatagacttcagatgtcatatagagataatgtcccatatagttctcacagattgcactgatcaagactgttttctctccatcatctgtatcaatcgttaatttatcaccgacattgacttccagcagtttcgctgctttttcagtcaggattactcctttatcatccaatgaataaatttcttttgtcttccgatcccggatcacgacaaactttttgaatgcttccacatctttgggtatatctaaataaacttcctgagaagactctcctgaactgatctcaatatttttcaaaagattttctgcagttactgataccttcttatccgtatccagttctttctgaacctcaattctctcttcttctgtcacatcttcctttaaaataacgtctccatcataaagctgaatctgttcgtattgaagcggaacgattgctgaaatagaatcttttaatccaaaaccaaacaacatcatacccatacaaccgccaattccaaatactgtcatgaagaagcgttttttataccgcaccagattacgcacggtcgatttccatgtaaaattcagatttttccagataaacggaactcgttccagaaatactcgttttccctgttttggtgtcggcggacgcatcaattctgctgcctgctctcgtaattctttcatacatgagaacagtgttgcgattactgtacatgcaagtgccgctgcacatgctgttacagcataatacaaattatacgggatcacaacatcatacatatgacgatacaagatcttatatgcagtgataatgatatatggaattatcttttctccaatcagaattccgaaaacaccaccggttaatgtcgcaaggatcgcataccagagatattttccaacaattgaagcatttccatatccgagagccttcaaagtaccgatctgcgttctctcctcctctaccattcgtgtcattgttgtcagactgatcaatgctgcaacaaggaagaaaatgagtgggaacactttaccgattgcccgcatacggtctgcattatctccgtatccgctgtattctgtcagattgttccgatcataaacataccactttggcttttcaagatcatcaatcttctgctgtgctttcgcaagctcttctcttgcttctgtaatctgccgctctccatcttcaatcttcttctgagcttctatacgaccttcctcatacactgcccaaccgtcttccagctcctttgttccgctgcttaactgctgctgtgcctcctcaatcttcttctgtccctcactgatctgctgccatccgctgtcaatctgctgctgaccggatgtaatcttcgcctttgcctgatctatctgccgacttgcggtaaggattgcagcatccccctgtgtcaacacatccgtcagtttctgtatattatcctgcaataccggaataccctcttcaatctgagctatcccggcttcaactgctggaatcccttcgttgatctgcgtcaatccggcttcgatttttgtctggtttttctgaatctccgcttcggcagctttcgactccaattccattttatccagatttgctttcaattcagtcaacttctcttccattgctgttttttcagcttccaactgttctaactgagcctttaattccggatcttcttctcctgcttcctgcttccgatcgtattcttctttcagtgcctcatagttctgtagaagaagttcatactgtgtatttagttcttcataagactgtttcaacggctgataaatctgctgatacgcagactgatagtcttctgcctgttgctgcaattcttcctttgctttcagaagctcgtctttcttttgctgcatctgtgtctgttgcgctaaaagttcttgtctctgatcttccagactttcttcctgctctttcagttgtgccagctgatttcttaatgttgtaagtgcaatctgtttttcgctaagttcctgtgctccctgctcaacttgtgctttggactgatccagctccttttgctttgatatcagaaaatttctcgactgctccagttcaagcttcgaagctgccagctgatttcttcctcgttcaagttctttctgcgctgcatcaagtttctctcttgcacttgcaagttcttcttccgcctcttcttttccatccgccagatcctgctctgcctgagctaactcttcttgtgcttcatccactttttcctgcgctgtcgaagtaatctcatcatatctggcctgttctctttccgctttaattgcctgaacctttttcagcacagaatccacatgttcttcatattctttcgtaaatgcagtcgcttcctttgcaccttcaacctgcactgtaatctctgtatacacatctaatgaaaatgctttctccggaacgcaaagaaaggcactgacacttccatttccgattgttgtactgcctctgtgaaatgcaatatactccggactgctgaccgtaccaacaatggtaaatgtatctgtcttaagtgtatcttccaaagaatccgaagtcccactcgataatgtgatcttatccccaatcttcagattctttccatccagataatctgcatctattacacattcattttccttttccggaagcctgccatcttctaactgaacttgattcatcttatcctggagcgccataacatgaactgctacctggtttccccgaatcgtacaaagtacatctgttgcatagcttccttctgcatccaatacaccatccacagcacgaattgcatccagatcatcttctgtcagtcccattgtactcattacctgaatatccatcaggttcttctcatcgaaatatgcatctcctgaatatctcatatccggctctgatgcacggattccggaaaagaatgcacatcctatcgcaacaataaagaaaatggataaaaaacgtccaaggctatgacggatctccatataaaagttttttcgtaatgctttcttcatccacatcccctaccattcaatttcatcaatcgaagtcggattctcattagattccattcttgctacctgtccattttttatatgaatcaatcgatctgccatcggcgcaagtgcctgattatgtgtaatgataataactgtcattcccttttctctacacatattctgaagtaatttcaaaattgattttcctgtattgtaatccaatgcacctgttggctcatcacaaagcaaaagctttgggttcttcgctaatgctctcgcgattgaaactcgctgctgctcaccgccggaaagctgtgccggaaaattattcttccgttcccccagaccaacttcctccaaaactgcctgtgcatccaacggatccttactgatctgcaacgcaagctcaacattttccaatgcggtcagattcggcacaagattataaaactgaaaaacaaatccgatgtcatctctgcggtatcctgtcagctgtttggaattataagctgtaatatcttttccatctacatacagcttcccgcttgttgccgtatccattcctccgagaatattaagcacagttgtcttacctgcaccacttggtccaacgattacaacaagttctccctgctcaatcgaaaagctgatgtgatccactgcatgaatctcaacttcacccattttataagttttcgtgatatcctgcactttaacgaattccttcatctacattctcctgactctttttctcttcttctgcatctctcctggcaagcagtctgttactcttttcttcgattctctacagacgcagtttctcccactcttctcctgcaccgaatgtctcatgaaaacgttccggaagcggtgtgtcttggaataatttcttctgatactgtacgatcagactcgcagctaacggcaccgcacctgaatattgccgtttcaaaaccttacaatatttctgacataacggatctggctttacactcatcactatgtcatgcaatgaatcgtatttccccactaccttcatcccaagaaacaacgcttttcgctttccagatgtcggtgccagaaacagcttatgataaaaaaccatcccttttaatgccttatagatctgctcggctgttacatctttgaaaaatggtgcgatcacttccgcatactccatcttaggatgaatatgcttcgctgtcagatagcgcaaaggatcatgataatcttccgtcagcatcattcgatccagttccatctcaatctcattgtgtgaaactcttcctacctgcataattttttcaacataaggatggcattcactgtctaaagcaaaatgacagataaatccataaatatatgcacgcgccgctgccggatcttttactttctcaatcacttcaacagcatgatggaaaaactcatcggcaaattgttcatgaagtgtatgcccctgttcattcaccggatctttctttaatgcattataataaaataagatatccggcccatgtaacccaatatcaaacaactctctatgcgcttctatagaattctgaaggggtcttggaagtgcgctgagcacctcttttccgaatttataatgtgcgtatgttgttggcataagaaacctctcctttttccgaattttcttgttaagatttataattactcatattattatattaacacattcttccctgtctgacagtaattatctttataaaaaatatgtgaaatgacattaaaaatgctaaatttttactgctttttcacttcttttaacgcaataatcacttgacatttatatttctttttactatattagtatgtacagcacacaagagaatgtgtctgttacagtagagagtattcattactctaccctgatcagggcttgtactggtttcgacagggatctcgaagatggagaagctatccgtaggctgatgcgttaaatcgcaaacttaaaattaaacgctaacgataatttcgaattagctgcagcctaaatgctgcatgtcagccctgaagcactcacactttaggaatctggcaccgactatgtgagaaacgatgacggcaaagctttgagctgtcaggcgtattatgaagctactgaacccgtaaggatgttagttttcgtacggcagagggaatgttaaataactgactatgatagtagaagtacatgggacaggtttttggacgcgggttcgattcccgccaggtccactttttaatgaaagtgtgaagacttcaaaataacggcattgcatctcgtaagaggagatgcaatgccgttattttttgaataatatccttacctccaaatggaatgcataaaacaaaaaactctgagattcttgcaaacattaacttcacaaaaatctcagagaaaaaaataatgccgcagaccggaatcgaaccggtacgggtatcactacccacgggattttaagtcccgggcgtctgccagttccgccactgcggcattcctcaaaatgctttcgcatcttgaacgacccagaagagactcgaactctcgacctccgccgtgacagggcggcgctctaaccaactgagccactgggccaaatatttaattgtcagctcgctgccccttactacttccaagcagtctagctaaatggaccttcggggactcgaacccaggaccgaccggttatgagccggttgctctaaccaactgagctaaaggtccaattgattatttctgttcctaagaacaagccgatgatcggactcgaaccgataacctgctgattacaaatcagctgctctgccaattgagccacatcggcataaatgaccccgacgggaatcgaacccgtgttaccgccgtgaaagggcgatgtcttaaccgcttgaccacggggccatactttgtctgtcgacttcctcaacagcgattataatcatatcatataaatcaccgtttggcaagtacttttttgatatttttttaatttttgaaacttttcaaataattcgacaaatcgaacttcttagtttcctactcctgatccgataatcaaagaataaaaagatcttacatttctgcaagatcttcaagctccccctgttggacttgaaccaacgacacttcggttaacagccgaatgctctaccgactgagctaaggaggaatatttaattaaaggttatgtaccttcaaaactacatacagtcaaaaccaacatcatcatccaaacctatcactgctttggttatgccctcgacctattagtaacagtcagctccatgtgttaccacacttccacctctgccctatctacctcgtcgtcttcaaggggtcttactaacttgacgttatgagatatctcatcttgaggggggcttcacgcttagatgccttcagcgtttatcccttcccggcttggctactctgctatgcctttggtaagacaacagatacaccagcggccagtccatcccggtcctctcgtactaaggacagctcctctcaaatatcttacgcccacgccggatagggaccgaactgtctcacgacgttctgaacccagctcgcgtaccgctttaatgggcgaacagcccaacccttgggacctacttcagccccaggatgcgatgagccgacatcgaggtgccaaaccactccgtcgatgtgaactcttgggagtgataagcctgttatccccagggtagcttttatccgttgagcgatggcaatcccactttataccaccggatcactaagtcctactttcgtacctgctccacccgtcggtgtcgcagtcaagctcccttctgcctttgcactcttcgaatggtttccaaccattctgagggaacctttgagcgcctccgataccctttcggaggcgaccgccccagtcaaactccccacctgacattgtcccccagccggatcacggctgctggttagaaacccagtactgcaagggtggtatcccaacattggctccatggcaactggcgttaccatttcctagcctcccacctatcctgtacatgcaataccgaatcccagtatcaagctggagtaaagctccatggggtctttccgtcctggcgcaggtaaccagcatcttcactggtatttcaatttcaccgggtgcattgttgagacagtgcccaaatcattacgcctttcgtgcgggtcggaacttacccgacaaggaatttcgctaccttaggaccgttatagttacggccgccgtttactggggcttaagttcaaagcttcgcttgcgctaacctctccccttaaccttccagcaccgggcaggcgtcagcccatatacctcacctttcggttttgcatagacctgtgtttttgctaaacagttgcttgggccaattctctgcggccatcttactggcactccttctcccgaagttacggagtcattttgccgagttccttaacaatgcttctcccgtcggccttaggattctctcctcatccacctgtgtcggtttacggtacgggtatcctgcaaacaatagcggcttttcttgacagtcagctcacgtgcttccctacttattttcagtccacatcacgtcttcagattaaagagcggatttgccaactcttctcctacctcgcttgtaccggtctttccattcccggctcacgctctctgcctgtgtccccacagttctgttacaggatagtacaggaatttcaacctgttatccatcgactacgtctttcgacctcgccttaggccccgacttacccagagcagatcagctttactctggaaaccttagatattcggccggaaggattcccaccttcctctcgctactcattccggcattctctcttcttaaaagtccacagctccttccggtactgcttcgtccctttaagaatgctcctctaccaattgaattctcaattccaaagcttcggcagtgtgttttagccccggacattttcggcgcaggacctctcgactagtgagctattacgcactctttgaatgaatggctgcttctgagccaacatcctagttgtcttcgaaatcccacatccttttccacttaacacacattttggggccttagctgttggtctgggctctttcccttttgaccacccaacttatctcggatcgtctgactcccatacatcatctacacggcattcggagtttgatatcccttagtaagctttgacgcccccttaggaattcagtgctctacctccgcaagactcgtatgaggctagccctaaagctatttcgaggagaaccagctatctccgggttcgattggaatttctcccctatccacacctcatccccacccttttcaacggatgtgggttcggtcctccattgccttttacggcaacttcaacctggacatggatagatcacccggtttcgggtctactccgactgactatgcgccctattcagacttggtttcccttcggctccggacctttagtccttaacctcgccagccagcgtaactcgccggaccgttctacaaaaagtacgcggttgagcatataaagctcttccacagcttgtaaacatatggtttcaggttctttttcactcccctcccggggtccttttcacctttccttcacagtactatgcgctatcggtcactaagtagtatttagccttacggggtggtccccgcatcttcccacaaggttccacgtgtctcgtggtactctggatcccgccatgtcaactcgtctttcgcttacggggctttcaccctctctggccggctttcccaaaaccgttctgctaaactcgttgaatcaattccgcggtccgaaccccagcatgcacgcacgctggtttgggctcttccgttttcgctcgccgctactcacagaatcacatgttgttttctcttcctccggctacttagatgtttcagttcaccgggttcccttccttaagttatgtattggcttaaggatacttgaggtttgctcaagtaggtttccccattcagaaatctccggatcaaaggatatttgctcctccccgaagcttttcgcagcttatcacgtctttcatcggctcttagtgccaaggcatccaccatacgctcttatcagcataaccaactcgacctcatcccacgggaatgggataacgtccacacatacatagcgttgtatgcgttggtgatagtcaatttgttttaagtctgttttcttcagactgtaagttaatgttgttaacattacctcggatgtcttgattagatatttatctaaatctattgatttttactatatgcagttttcaaggtacataagatgaagtccttattcagttcttcatccgactgactttttcatcagtcatcagagactaaaagctttcttttaaactctgatcactggtgaagaccagctttatcgcagaacctctcggtttattttctttttaatttggcggccacctactctcccacaccgtctccagtgcagtaccatcggccgcttaggtctttaccatcgtgttcgggatgggaacgggtgttacccctaagcgcatcgccaccaaaaggtttaggttacttgataacccaacaatagacaacagtaaaaactctctacttctttcttccgttttagttggattgttccagacgaaagaaagcatttcttccttagaaaggaggtgatccagccgcaccttccgatacggctaccttgttacgacttcaccccagttatcggtcccaccttcggcagctccctccttacggttgggtcactgacttcgggcgttactgactcccatggtgtgacgggcggtgtgtacaagacccgggaacgtattcaccgcgacattctgattcgcgattactagcgattccagcttcatgtagtcgagttgcagactacaatccgaactgagacgttatttttgggatttgctcgacctcgcggttctgcctccctttgtttacgccattgtagcacgtgtgtagccctgctcataaggggcatgatgatttgacgtcatccccaccttcctccaggttatccctggcagtctctctagagtgcccggccaaaccgctggctactaaagataggggttgcgctcgttgcgggacttaacccaacatctcacgacacgagctgacgacaaccatgcaccacctgtcatccctgtcccgaaggaaaggcaacattacttgccggtcagggagatgtcaagagcaggtaaggttcttcgcgttgcttcgaattaaaccacatgctccaccgcttgtgcgggtccccgtcaattcctttgagtttcattcttgcgaacgtactccccaggtggactacttattgcgtttgctgcggcaccgaacagctttgctgcccaacacctagtagtcatcgtttacggcgtggactaccagggtatctaatcctgtttgctccccacgctttcgagcctcaacgtcagttaccgtccagtaagccgccttcgccactggtgttcctcctaatatctacgcatttcaccgctacactaggaattccgcttacctctccggtactctagattgacagtttccaatgcagtcccggggttgagccccgggttttcacatcagacttgccactccgtctacgctccctttacacccagtaaatccggataacgcttgcaccatacgtattaccgcggctgctggcacgtatttagccggtgcttcttagtcaggtaccgtcattttcttccctgctgatagagctttacataccgaaatacttcatcgctcacgcggcgtcgctgcatcagggtttcccccattgtgcaatattccccactgctgctgctcccgtaggagtttgggccgtgtctcagtcccaatgtggccggtcaccctctcaggtcggctactgatcgtcggcttggtaggccgttaccccaccaactacctaatcagacgcgggtccatctcataccaccggagtttttacccctgcaccatgcggtgctgtggtcttatgcggtattagcagtcatttctaactgttatccccctgtatgaggcaggttacccacgcgttactcacccgtccgccactcagtcaccaagatcttcatccgaagaatcaaatcaaggtgcttcgttcgacttgcatgtgttaagcacgccgccagcgttcatcctgagccaggatcaaactctcgttaaaagtgtttgtatccagttcagaaccaactaactagctaattcttccctttttactgttgttttggtttgtttaaaaaccgttcttaaaaatcttctcttaaagaaattttcaagggttgttgttgtctattgttcagttatcaaggttctttgtttgtgtcgttcttttcaagcgacagcttgtttatattaacatagctgtttttgtttgtcaagaacttttttaaaaagttttatgagctttcataaaacaaacggagaaggagggatttgaaccctcgcgccgctactaacgacctactccctttccaggggagccccttcggccagcttgggtacttctccataaaaaacggagagggtgggattcgaacccacgcgccctttcggacaaacggttttcaagaccgcctcgttatgaccacttcgatacctctccataatacctaatcattgccgattagcaattcttattaagttgttgtcgtttcacttgcgacgctgataatcttatcataaggtggacctaaatgtcaacacctttttttcatttttttcacatttttttaactttctttgttttccttgatttttggggctttttccacactttacaacatcggaaaatccccctcttttcttgaattttcttgcatcttcctacagaaacgcttccgccacaagaagatcttccggtgttgtgatttttatattttcatatgctccgggatataatttaacagtatgtcccatcatctgctcgactaccatcgcatcatctgtcgcattttcaattttctcgttgattaatttctgataagcctctttaatcagctgaacgtcaaaaacctgtggcgtctgaacaagccagagtgtttttctctccagcgtgcctttcacataattcttttcatctacaactttgatcgtatcctttacaggcataccggcaacacatgcctttgtttcttccacacatcgataagcacgctcaatcatcgcatcatccacaaacggtcttgccccgtcatgaatatatacgaacccgtctttttctgtgatctgctgcagaccattccagacagaattataacgttctgcacctccggctacaattttatgcactttagaaaaactgtatttctctacaatttccttttggcagtattcttcttcccctgcgccactgacaagaacgatctcatcaatccacgcagaatcctgaaatgctttcagagaataataaagtacaggataacctttcagcatcaagtactgtttatgaacttttgtccccattctttttccacttccgccagcaagaacaaccgctgtacaatatttcttctccatttttctctcctgttattcacattaaatacaggattttgcaaagttattcacaactcatcacaaaatcctgttcatatctctttgttattcaaataactgacacgtaaatcaactatcttaacgttcacccaatttcaggttcggcacagcattcaaatcccatcccgaacgagttccggcaaggtattcataataagccgccgctccgatcattgccgcattatctgtacagtaaatcggtgacggacggtagaatttcattccacgtttctcacaagcttcttccatcgcttcacgaagtgctgaattagacgcaactcctcccgcaatcgcaaatttcttcatgccgagtttttctactgcacgcattgaattacccacaagaacttctactactgccttctggaaagatgctgcaagatctgcaggatcaaatgtctcacctttcatcttacagccattaatataattcaataccgctgatttcagtccactgaaactaaaatcatactctgcatcatttacctttgcctttgggaactggattgcatccggattcccctctttggcaatacggtcaatctttggaccgcccggataaccgagcccgattgcacgagccactttatcataagcttcacccgctgcatcatctctggttcttccgaggatctcatattttccatattctttcacacatacaagatgcgtatgtccgccggatgcaacaagacacacaaacggtggctcaagatccggatgttcgatataatttgcagaaatatgtccctcaatatgatgcactccaaccagtggaatatctttcgcccatgcgattgcttttgcttcagccacgccaacaagcagggctcctacaagccccggtccataagttacaccgattgcgtcaatctcatctaatgttgtccctgcttcactaagcgcctctttaatcacctgattaatcttctcaatatgctttcttgatgcaatttccggcacaacaccaccgtataatttgtgcagatcaatctgagaagaaatgatatttgagcgcacttctcgcccgtttcgtactactgctgccgctgtctcatcacaggaactttcgatcgccagtatattaatctctttgctttcactcattttctatccctctcaatcttcaaacatcagatcaacagacattccatcctttccagctttcgcccgagggaatatctttttcacatcattcatataatgttccggctttgtaagtgacgggctataatgtgtcagccacatctcgccaacattcgcttctttcgccagttccgccgcttcataaaatgtcatatgcttatactctactgccttcgctgctttctctttctctccatacatgccttcacagatgaaaagatcagaatctttcgcattctcacgaatcgaatctgtcggtcttgtatctgttgtataagtcagcttaattccttttctctgtggaccgagcaccatatccggtgtcaaaattcccatttcactttctacagtttctccgttctgtaagcgactccagtatttctgcggaatctcatttgcacgggcacgctccacatcaaacttaccggcgcggtcaatttcaatcgtataaccatagcaaagtacattatggttcacacgaaatgctttcaaccggtatccatttaactcaaatgtctgctccgctccctgaatctcctgataaatgattggaaatggcagttccggcgcaattacgcgcaggcaactgacaaccctttcaagacctttcggtccgatcagtgtcaacggttccctacggtctgcatttcccattgtaagtagaagacccggaagcccactgatatgatccccatgataatgagtaaaacagatcacatcgattggtttaaaactccagcccttctcttttacagctacctgtgttccttctccgcagtcaatcatcagactgcttccgttaaaccttgtcattaaggaagtaaggaaacgataaggaagcggcatcatcccaccacttccaagcaaacatacatctaacataatattcctctatcttctggtccattacggtttgcccgaaactgcaagccagactctttcattcatctttacattcggttggaatgaggaacccctttgtaatttcatcaaaacactcctcgcacagatcaaaactgcagctttctccatcttttccagaaaaataaccccaggtatgctctacatgaagcatctctcttttcggaatcccactcacaacttttgtttcttttccacaccggttacaaataattttcgtaatttcttttgtttctttcaactgatactggcgcatacgttttcctcctgtgagcagcaattatgttgttactcatcattgtaatttacaaaaacggaatattcctgttttcttcctttgttacgcctcaattatacaaaacagttttcgcaatttccactggaaactgctggttatttatctatttccagactcatcagtactgcatcttccttcggatcctgatagaatgctttgcggactccatcgtttacgaatccttctctcgcataaaatgctcctgctgcctgattactttctcttacatccagcagaacctttgcaatctgatgttctttactccacgccttcaaagttagcattaatgcatgaccaaccccctgacgtttcatctcatcaatcactgcgattcttgcaatctccacttcatcaaccgcagtatagccaagcagatatcctactcttttccctgctttttccgcaacaaagcagacactattgttctgttccagtgtctcgagaatcgccttctcgctccaggcatcagaaaatgactggtgctcaatctcagcaactacagcaccgtcttcaatcgtcatctcacgcacttctgtctttgcttccttttcacgctgagcacgttcgcgctctgcctgagacacacgcagataatccggcttatgcgcctctgctgtctcatattttcctgcataataatacgcaataccaagtgctcctactacagccgctctctgacggttcatgtatgatggggcaaatgaatacgggacttcaagtccctcttcaagcatctgacgatacactggtactccgtctcccaaaaatacaaccggacgtttatacgcattcagcttactgatcaactcttctactgcaatcgccatctgctgttcttccacatgaaatgctgcctctgtcagatgtgttccatctttcacttcatgtgaaaatgaatacaatcctgtataaacctgttttcttctggcatccatgattgggcagatcaagtcgccacatccataaacattataggccagtgcatccactgtcggaacatggatcagaggttttccgagagcaagtcccagtcctttcgcagtagcagatccgattctaagcccggtaaaagagcccggacctcctgacacagcaatagcatcaatgctggacagatccagatcgatcatcttctttacctcatcaatcatcggcagaagtgtctgcgaatgtgtcttcttataattcacggtatactccgcaattgtctgttcatcctcaacgactgcaaccgttgctgtcagtcctgagctgtctatcgccaatactctcatggtcttgcttccttcctctgtcagctgctgtaaaaatgttctctgtatcaacagccttctctttgttccattcttctaattttttatcgttattgttcctcgattgtgatccgacgataatcaaatccctgtgtcagatccttctcgatcagaatatttgtccgacgttccggaagaatctcttctatcagattcgcccactcgatcagtgagacaccttctcccatcacgtattcttcaaatcccacctcgtccatctcttcaatgtcaccgattctgtagacatcaaaatgatagaagggcagacgcccttcttcataaacctgaacgatggtaaatgtcggactattcaccggttcttcaatcccaagtccttctgcaagtccctgagtaaagaccgttttcccaactccaagatcccctgtcagggttaacacctgacctgggaatgctttttcaccaagacttttaccgactgcaaatgtctcttccgggcttcttgtctctatcaccataatatttcagcctttctataccgccggttcttcaccaaaagtcccggttcttttatcatcttatcttaagtttctagtgatggaacagacggattcctgtaaatgccattgccatgccgtatttgttacatgtagcaattacattatcatcacgcacagatccacctggctgtgcaatataagttacaccactcttatgtgcacgctcaatattatcaccgaatgggaagaacgcatcagaaccaagcgcaacacctgtcagctggtccaaccatgctctcttctcttctcttgtaaatacttccggttttaccttaaatgtattctcccagacaccatctgcgagaacatccatatattcctctccgatgtaaagatcgatcgcattatctctgtctgcacgtccgattccatccttgaactgaagtccaagtaccttcggattctgacgtaaccaccagttatctgccttctgtccggcaagacgtgtacagtggattcttgactgctgtccggcaccgattccgattgcctgtccatcttttacataacatacagagttagactgtgtatatttcagtgtaatcatggaaatagcaagatcgatcttcgctgcatccgggatctctttcacatctgtcacaacgtttgagaagaaatctttatcgatattcagttcatttcttccctgctcaaatgtaactccgaatacttccttgtgctctaacggtgcaggcacataatccggatcgatctgaataatattgtaatttccttttttcttctgtttcagaagttcaagtgcctccggctcatatcccggtgcgatcactccatcagatacctctctcttgatcaggcgcgctgtatcaacgtcacagacgtcagacagagaaataaagtcaccgaaagaagacatacggtctgcgccacgcgctcttgcataagcacatgcaagtggagagagctctccaagatcatctacccagtaaatcttcgccagtgtctctgacaatggaagaccaacagctgctccggctggtgatacatgcttgaatgaagttgcggccggaagtcctgttgctttcttcagttctgataccaactgccatccattgaacgcatccaggaagttaatatatccaggacgtccgctgagcaccttgattggaagctctctgtcgtcgttcatgtaaattcttgaaggtttctggttcgggttacatccgtatttcaattctaattctttcatctgtctttacgctccttatttgttcttattcacgatctttgtctcatagttacctgtctcgatatcaatgtaacggacaaataatgacactttattttcctcattcaggctgttccacagaaggtctgcaaactcttccatgttgtccagcacctctaccagcttcggttctccctcaaagcttggaagcgggttgccatcatgcatataagtgtgaataaaatgagcttcaccggctgccggattctcgtatgcaaaagtatatctgttgcaactatccgggtttccgttattgctcttcaggattgacattgcataattgaaattgccattctcaatatgcatcacaccagaaatacgtggtgtgtagttcggaccatccggctcgaattctctagaacgaagagactgctcaaaagtaagctgcttatccattccttcataaatcgtatctgtctgatccccgtttgttacgatcgttttattacccaatactctgaccggtgcgtaaataatcaaacttgggtctgtaagcttcgatggatcaaatgcctgtgtacggattccctctccgtcctctacaaacacacggtttctactgttctcactgcgtcccataataaaataggcagtgacagccttctttccatccgggcttttaccaataataattcctcttcctggataagagttactcttaagttcctgctcaatcgacagcatcttcattgttgttctcctttcggtacgttcgctttcttgacaatctactagaaaaaaacgaaaaacttctcctaaaataatagattcaggagaagtatatcatgcacatgcttttttcgcaagtccaggcccgacagctattgaatgaaaaatcctgattttccgtagcttcggacctctttctattaaattctagtaactattcactctttttgatcaattctgtcatctcgcctgccggaattccaagaacataattcatttcacttgaaagagcatgttccagaagcagctgatatttcttatccatgcttgtcatgctgcctcttcgtttcgttcggctatacaatgtcttcagcactttgacccagttttcaggacagaagcttgagatacaatccttgtattcctgttctctgtacttttcattctttacattcagtataccaacctctgcaagattatccagcagttccttcgctttctgctcacttaccggacgacggatgttcttctcatcatcaatcggaacatacgccttatctctctgattgtctatggattgtaatgtataataatctttcttgccatccacaaatgaaaaatccagttttcctacttcttctaccttgtacactcctctgcacttatatacaactgcgtctcctctgctgagcattttcaaaacctcctgttctttttatttacactgttgttgtccacaatgtactgccctttttataacagactctacgtgtgtagtataacattttttcagtattattttaagagatttttaaattttcaaacattttcgtgattattgcataattcacatgcagttctatttgtgcaatttttagaatacttttgttgtccactggctcatatcccacacttcatcaaccacatcctgataaaattcaggttcgtgacagatcagaaggatacttcccttgtactcctgtaatgcctgcttgagagagtcctttgcatccacatcaagatgattcgtcggctcgtcaaggagaaggaaattcgtatctctgtttaacaacttgcagagacgcacctttgcctgctctccaccgctgagtacacgcacctgactttcgatatgcttcgttgtaagtccgcattttgcaagcgcggaacgcacctgatactgtgtataagaaggaaattcctgccacagttcctcaatacaactattacggttttctccttttacttcctgctcaaaataaccaagttcaaggttatcaccaagttcaacacttcctgctaaagaaggaatcaatccaagaatactcttcagcaatgtggtttttccaattccatttgttccaacaagtgcgattttctgtccacgttccatagagaaattcaacggtttagataatggttcatcatatcctgtcacaagatccttcgtctcaaaaagcatcttaccaggagttcttccatatttgaaatggaattccggctttggtctttctgccgcaagctcgatcacatccatcttatccagctttttctgacgggacatcgccatatttcttgtagacacacgagctttatttcttgcaacaaagtccttcagctcgctgatttcctgctgctgacgacggtaagccgcttcaagctgagctttcttcactgcataaacttcctggaaatgatcataatcgcccacataacggttcaattcctgattttccatatgataaataatattcacgacttcatttaagaacggaatatcatgtgaaataaggataaatgcattctcgtagtccagaagataacgcttcagccatgcaatatgctcctcatccagatagtttgtcggctcgtcaagaagcaagatatccggcttctcaaggagaagtttcgcaagaagcactttcgttctctgtccaccacttaagtctgtcacatctctatccaatccaagatcaagtaatccaagtgcacgcgcaacctcttctaccttcgcatcaatcgtatagaaatcatgcagtgtcagttcatcctggatcgtaccaagttcttccatcaacgcattcatttcttcctcatctgctgttccaagcatatcacagatttcattcattctctgctccttctgaaggagtggatcaaatgcggatttcagagcctgacggatcgtcattcctttctcaagaactgcatgctgatccagataacctgcatgcacattctttgaccactcaaccttcccttcatccggtaacattttccctgtaacaatactcataaaggtggattttccttctccgttggccccgacaagaccaatgtgctctcctttcaaaagtcggaatgacacatcattgaagattgcacggtctccaaatccatgtgtcaggtgttctacatttaatatgctcatatcgctctccaatcgtattcttattttgtaactgttcagagccaagcaaaatttcaaaaaacaggtataaaatgcttgcatttttaaaactgtttttgaaattttatttggcggatacgccacaccgacgaaatgcgtagcattttggaggttggctctgaacaattactcttgttttcaattcttacttcttattcctgatgactctccagccatttcaccgcacactgtgccagacatgccacaccgatcgggcagacatcttcattaaactgtaccttcggattgtgtgccggataagttccccgctcatccgtataacctgctgagagatacataaatgtactcggaactttctctgcgatcactgcaaaatcttccgatgcacttgcactcacatctggaactggagtaaggcccggaatatccatctctttcatatatccaatcatttcgtccgtcaatgccggattgcagatcagcggcggaacttcggagatcatctcgatttccacacttccattatatgcatctgcggtcttctctgccacttctttcattcggcgaacaagaagttcgcgctcttttgtattgtttgtacggatcgttccctgaagaactgctgtctctgggataatatttgccgcctcgccggccttaaactgtccaattgtcagaacgcatgcgtgcgccggatcagtctctcttgcaatcaactcctgcaatgcaagatgaatgtgtactccgatattaatcggatccacacccgcatgaggataggctccgtgagaacctttccctttgaccgtgattttaaatccatcaacagaatacatcattgtgcctttatcattatacataaaaagtccgaccggcatctttcccggagatacatgatacgcaagtgctgcatctaccttcggattctcaagaatcccatgctcaatcatattcttacttccctgaaatgtctcttccgccggctggaacatgaatttcacagttcctttcaacttgctttcctgttcttttaagattcttgccgcactcaaaagcattgctgcatgaaaatcatgaccacaagtatgtgctgtttttcctgttggacaggcaaatgcttcaccactttcctccggcatcggaagtccatccatatctgcacgcaggagaagaaccctaccgccatttccaatcgttgccgtaactccctctccgcattcaaccggatccagaccatactctttcaacttatccatcacataagctttcgtcttcggaagctcaagtcctgtctctgcattctgatgaatgtatcttctgtctgctactgtttcgtcttttaattcaagtgctctcttgtagaaatccatcgtgattgcctccttgtgataaatataattttctgcgtccattttcccaggcgcttttgtgattataacactattttgatgcttatgcactaaaagaatacgccccagatctgcaactgcttttttgcattttttaactatgctaaccactggacaggtgtctgcatcaacaaatagttacatcgtcatttccacactttccatctatatatggctaataacggaatccggatcatttttatcgtaacaaaccttgtctccttcattgatattgtttttataaagcagggcatcctctgctttcaccctcaattcttctccggatgaatctacaagtgtaaccactgccataaccggagcgtctttggctcgttcttcgcaaccaaaatctaaatcttcatcgattctctttactgtataaatcataataatttatcctttacctttcttatttccacgctttccagacatccggctgataaccaagtgtggattgctttccatttctgacaaccggcgttttaatcacctgcggattttcaagcaccttttccagcttatcttcatctgcaatatacttaatgagagcaagaagatctttgtcttttccttcccagttgatcatattttctaatccaccattcacctgcgcaactgaattgaattcacccttactcatacctttttctttcatatcaatgaactgaaatttgattccacgttctttgaaaaaccgctctgctttcttggtgttattgcatttcttagttccaaaaatctgtatgttcatttcattttcctcgtatctttatattgtcaatatttgtttattattacacttccttataatacaaacaaatattctgatatgtcccatctttcatacggaatccattcggtacagttccaatctgcacaaatcctaatctctcgtacaagtgacgtgcgtgaacattattttctaccactgcattgaactgtaaaatcttaaagtcatgcaactttgcctgtacaaggcagtcacttacaagtttctcaccgatatgctttccacggcaagttgaatccactgcataacttgcatttgcaaggtgcccacagcggccgatgttattcggatgcaaaatgtaaagtcctacaatttccccatcattatctgcaacaccacaataagtctgtgatgcaaagaattctgcccctgtcttatcatccaggaactcttcctgtggaaatgcttcaccatcttctactacttcattccagatgcgaaccatctcggaaatatctttttctgtatattttctaattatcataatgtcattttcctcttctggtctaactttattgtactgttgaatttttactttttctatattctgttggagtcattttataactctttttaaatactctacaaaaataatctacattatggaaccctgtctcgtaagaaatcgtattgatttttttctctgtatttttaatcaacaatgctgccttcttcagccggtaaccgatcaaataattaatcggagtgatatgtaaaaatctattaaaaagattcaacaccgtacttttactaatattagcataacaggcaatttcctccaaagaaatatcttctgcataattctggtgcaaaaactgcatcataagctgcaagcgtgcctgaactgaaccggaatcgtccacttgctcttccatacacgttttgtcaatattttcataaatgatcagccataatttctgcataagaactgatgtaagcagctcaccatcaacttctctatcctgtgcagaaaatatttgcttcataatttctaatgtctctccttgccataacttctccccgtttaagatcaagtatgacaacgatgatgaaacaatcggttgaatatatttttgatagatcaaactattttccggcgcaagaaaggacggcatacaaaggaaattggggatgacagtttcatcactggaataaaatttgtgcaaaatctttgaatttataaaaataccattcccctctgatagtgaaaacatcgattcaccaacacataccgtcatgtttccggattcgacatatacaaattcccattctgtatgccaatgccagtcaatgcaatgaaaatcaaattgtgataacttttcaaaatagcatttaaacggataactgtccgtcccatgttttgctgattccattaaattctcatctgttacaattttattttgtgccatatctttcctcacaacaacctttttattggatttacgatataatacaatatttatgtaatataagtcaatgttttttcttgttatctaatatataatacggtataaaaagaacaaaggagttttctgttatgccagattatcaaaaaacaaaagtggcatgttatctgggattcgtcactcaggcgatatccgcaaatttcgcaccactattatttttaaaatttcacaatgattatgatatttcattgggtaacattgctttaatatctacattctttttcttcacacagcttttagtcgacttattttgtgcgaagtttgtagatcgaatcggttatcgtgtatgtatcgtaacttctgaaatatgcgctgctgccggattagttggacttgcatttcttcctgatctgttaccgaatccttttaccggaattattataagtgtaattatctatgctgtggggagtggattgatcgaagttctctgcagtcctatcatcgaagcatgcccgtttaaaaataaagaagcaactatgagcctgcttcactccttttactgttggggtgcggcagccaccatactgatttcgagcttatttttcttcctgttcgggatgaatagttggaaatggctggcagtcatgtgggcacttattccggcaattaatatatataatttcgcaacttgtccgatagaacatttagtaagtgacggaaatgggatgggcgtcagacagttattccgaactcctgttgtctggctggcaatctgcctgatgatttgttcaggagcatctgaattggctatggcacaatgggcatcagcctatgccgaagctgcactgggactttctaaaacttttggggatttgattggaccttgcatgtttgcaattacaatgggaataagtcgcctgatttttggaaaatatggtgaaaaaatggatttgatgaagtttatgacaggttccggaatcctctgtgtgatctgttatcttttaaccaccttatcatcgaatccggtaatcgggttaaccggttgtattgtatgtggtttttcggttggaatcatgtggcctggaacaatcagtattacatctaaaaaaatgccggccggtggaaccgcaatgtttgcattgctcgccatggccggcgatttgggaggcagcattggacctggtattgtaggttatgttacccagaattctgataataatatccgtgttggaatgggaattggtcttatctttccacttgttctcttaatcatgttatttattctttgcaaggggaagaatacgcaggaatcgcttcatacagtttaatttcagttgaagttgaatttcttatcctaacctcaatcgattctttctctacataatttatactctctagatggaacgcatcatcttgcactcgtatggtctcaacgttccatctacttttccgtcagagtaattttcaagcaacaattcatatgaatcccactcactctgccatacaactttaggttctgcctgtgaaaatccggcatttttctctgctgaccattgcatcggagtacgtgagttatctcttgagcgttctgacaaaatatgcagtgcttcttcttcactttttccgttttccagaagaatctgataatagttgaaactttctacatcacgatactcctcaattgttgtgaaatgtgcattggtcataccaagttcttcgccctgatagatatatggtgtcccttgcatgaaatgaaccaacgccgcaagcatttttgctgattctttccagcatttcgtttcgcatgagatattggaacgtaaggtgcattatgagagctgattcaactaagcacctttcttcacggccaggtatttatgatagtatctagcctctttctgtattttctttcacgcttcgcgctcttcatcagacttgaagttatcttacttcgctttgaactctatccactcgttatctataaggacaactacactgtcatcctcaataactgcataaggtgttcctaaatctctgttgaaattggcttcgccatctttttgaggtatgccgttttctgcataagaagtagtatattgaataacactctcgtccacttcaacaggaacagcatgatcagtggaatagtagttagtaccatttaccattatagttgcagggtagtcaccactatctgattttccacaccttgccaaagtaagaatacaaactaatgtcaaaactgatgcaattaactttttcatacaatcacctcgctattcacttttactatttccgtaataatattgccaataaaacaattagaactaatataattatcaaaaaaataaatcttatttgaccgtgaaatcctaatccgatccactgcaatactattattaacgcaaaaactaataacgcccagtaatttcttttcatgcaaatccctcccttaatgtctggtggtcatattgatccagaagaatcaatgcatctgtgtattcattcacagctctgagcacatctttctcctctatatcaagtgcatctgcaagcatccttgactgaatatcaactgttttcttaagcgcctgaagacgcttttcattgattgcatagccttgcaaaataaactgtttaaggacattatttgcccattttctgaaagttatacctcttttagaattaactcgatatccgacagacaaaatcatatccaaattataaatttggggttttcgtccccctgtacttctgtcggaaaaaccgacagaagtctcatccagttctcctgaagcaagaatatttgaaatatgttcgcttactgtagcgtgcttaacatcaaacaacacttccagtttgcacatccaatcattttcttcattctatcacagcatcttattattccgccatcaatttttcaaaccaggtactcttgacaataataaactggtctgcgcctttccattcttgcagcatttcatccatcccgagcaaactcggactttggcccgtcacaataatcgagtaggagggagcatatcaaagcgacagccccgtaggtatcttttcagttttatcatttattttcgatttcacatcatatccgcaattaatgatagttcatctgttgaggaatactccaaaccattctttgtagttcgtccatattcactaaataaatacaagttcttttttgccctagaacaaagaacataaagaagtttacgctctacagtgtctatcaccgaaaagtgtcctatatttaacgcttacctatatttttagatatttttgttgcaaacgtattgcaaaccgaataagtttcaccacatttctagacatttcatcaagatttaagggtaaagaaaaaccccagaaccgaagttctgaggtttgtaatctctttgaattgtaattctcttgcgagataattatctctttgagaactgtggtgctctacgagctgctttgagacctggtttcttacgctctttcatacgtgggtcacgagtcaggtaacctgctgacttgagaaccggtctgtaatctgcgtctgcctcaaggagtgctctagcgattccgtgacggatagctccagcctgtcctgtgtatccaccaccacatacattaacgattacgtcgaacttgtcagctgtctctgtagccacgagcggctggcgaacaacaaccttcagagtttcaagtccaagatactcgtcgatatctcttttattgattgtgatctttcctgttccaggtacaagatatactcttgcgatagatttttttcttcttcctgttccgtaatattttgcgttagccactgttatttcctccttctacctaaaatgtaagaacttccggcttctgagcctgatttgcatgctctggtccagcgtatacatgaagcttcttgatcatgtctcttcccataggtcctttcggaagcattcccttaacagcaagctcgatcaccttctctggcttcttagcaagaagctcagcaagtgtagtctctttcattcctccaacatagtcagagtgattgtagtagatcttctgctgtaatttctttcctgttactttaactttctctgcattaacaacgattacataatctcctgtatcgatgtgcggagtatattccggtttgttctttcctctgagtacctttgcgatctcagatgcaagacgtccaagtgtagcgccttcagcgtcaaccacataccattttctttcaatcttatcagggttagccatataagttttcatgggtgttcctcctataaataatcattatatactattgcttatttatttgaaatcagcatactccggggctttggtgcatactgtttctccttatgtcataccttgctattatatgttgatttgtgttccgtgtcaagtgttttttacataaaatcgcattttttctttcagttctcaacagcaaagcaaaactttttcattcttttacaaaatcatctctatttcgcacttaaaaagtgccgagtcatatggatttttcctataactcagcacttttttcacattccctactcaacggttattgctccctggaacaatcaaaacctttgatttccttatttttcttcttttgcctgctctaattctttaagaatctgagctgtaagaccttttctatctgttttgaagtggaagtaaggtctttcagtaatttctctgatctctaccggatattcatgttcttccagtgtatctttcagcagttctgctacttcctcaagtgtctttgttccatcaagaatcacaaacagatatggacgataatatccttcatgctcctgatccggaacgagacagaagaatccatctttcactccaggagttcttactgtttttgtctccattctcattacatgaagtggcttgtctccatacgctttgatttcaccacgaccaagaatatgcacaattccctgctctgtgatataagcctcgtctcctgtatgtaaccatgtgtttccatccggatgctcaacaagtgtctgctctgtcagttcttcacctctccagcctgagtaatgaagcatcatagacggacctgtcatacagagttctcctgattctccgtaatttaattcattcagatctttgtcaaatacaccaagtacagttgctgtcattggcatacctacacatccatcctccaatgggaacattgggttcggcagtgtgaggtttgagcatccctcgctctgtccataacctgcacttaattttgcctgaacgttgtgtttatggaagaattcttctacctctgcatacttacggtcattcatagcttcggcacctgcaccgattgttctcaggtgagacatatcgtaatcttccggaattctctcactggacattaacatctcgcaatagagtgggatcaatgcccagaagttcggtttacgatccatgaattcaatgtcaatattctctaacggacagaatggatcaagtgataccattaatcctgtagaaagtgggaagatcgtcattgaaactgttactgcgatcaatgccggtggaagaattggtgtccaccagacttcctgcacatctgacggcggaataaagattgacatctggtatgcagttgctactatattcgctgaagaatggattacaagtttagagattcctgttgaaccacttgtgtatgctccaaacacagctctgtcaggatctaccggtgcaagatattcacctttgaagtttcttcccagttccataaactcctgccagctcatatcgccttctgttgtctctgtctctgccggatagcgggctgtgatttcttctaatacataatccttcatctggctcttgtctgcatattcaaatggtgacactttaatcatacgtgtcatcggagttgttgtacggaataactcttcatcttcttttgaaagataatccattacaaatgctgtatctgttttacatttacggattgcaaaacaaagttcttccggttcgtcatcacgacagataattgctacaccgactctttctgctgcaagaagcagaataaaatgagctggcgtagatactaaaaaggacggaactctgtcaccttcgttaaatccaagggctttcagtgctcttgccgcaacatctacatcttcccataactgtttccatgtaatcttatttccataatactcaaatgcgatcttatcctcattcgggtttttcattttcaggaaagcttcgattgtaattcttggtatctcaagatttctgaactgttccggataaaagttcagccaaggtttgtcaatacttgctttacctgtcaatttctgctctgtaaaattcataattttgtccccttcttttcttttgtttttcttgtcatttttccccaaaaatactttcaaattttatcacaggttctttcaaatgacaatttatggaaacttgaatcaacatgattcacatgaatcatcttgttttccaagcttcatttttgaaataaatacaaaatcgtaggtaaattatggttcttttattgcaattttattttctctgctctaaactaatatcatactatcaacttctttaaggtatttttaaaggaagggggacatattacaagttattctatgctctgtaatataacaaaaatatgaaagataaaaaccgtttcagcattttgctagaacaccttatggctattgctgagctaaagaatagtattcttgcaaaagctgttcagtatgatgactcctatatcagtaaatggattagcggaaaactattgccaactgaaaaaaatcatgaaaatacacttcaggctatcagtcactgcattgttgaagcactttcagaagaaagcactgcacaactgttacaggaatatcagttacaggacatcaatgatcttgaaactgctatttatgacaatctcgaatctgaatatatgtatgtaaaagaattacaaaactcaaccggtacagaagtagctccaaaaatttcttattatccggagcttacattagaccagttcatttttaaaatgaaacacccttcacttcgaaaagttaattctctaaacgtatacgcgattgttgatattttgaatgtcgatcctaattaccagcttttgattgcagaactcaacagtgcacacggcggccggaatcttattctacctggtgtacatttttcacttcttatggacctggaatcggctgcttccactcctgcctataccgctggtttcttaatgaatgtgatgaccaatctctctaatattgattttaatctttattctggttcgcaggctcaacgtaagctcatttttgcaatcagagacacttatgctatctctggaatgttagtagatagcagtcactgtcttggaattaccacaattgaagacagtgatctaacgaatgaactttatcacaagatcagacttctttgtaataaagaaacactattaatccggaaaacaaccattccggaaatgattcatcgctttgaatatgaacaaacgttaatttcacagaagcaatactgtctcatcggacacctgacagaacattttcttccggaagatctatatacggagctcctggatgagtattgcctgaataacaacgatcttcagaaggaggacgtaaaaaaactaaatcacctgacacagcgcattttggagaccacaccaatccatctgatcatttatgcttccgtgttaaaagatttcacagttacaggagaacttgatttcttcggtgtaagaatatcattaactatatcccaaagactgcgttgccttaagaatctggaacagctggtaaacaaacttgatcttatgcatgtatgcgttcttccggaaggaattctttccgaccatcagcacatagcacacccgacactttttgtatcagattctttgtgttatctgcgtttaaagaagttgactccggaatataacatctgcattccaaataagattatattggatcatatcttcgaagagtttttcgatgatgtctgggattctaatattgataaaaacagccataatactgtagtagccatgattcagcatgcaattcatgcaatagaaatcatgcttgaagtcaactaaaaatgagtatcaataaacaatcccctacctgttgctatttcaaattaatctgcaactggcaggggattatttatttattcatatgttgtctgattcggatagttaaatgcaatataactctttccgcggttaattgatatttcatttcctgattcatcataaaatgttaatcttgataattcattattttcctctttactccaatgaatcttctgttttgcaccgttcgaaatgtaatatcccatggagtcttcccagccatcccagtcaactgctttatgtcccaaatcatctttgacagagatagtggtctctaacacaaacacattggtaaaagcaagctggtttcctgtctttccgtctatctgggcatttccatcaatttcttttttataagtattgcttgcttcatcatagacaagtgtagcagactgtgcgccaaaatcaatactcactttcttacacacatcttctgatggtttcacttgttcatttaatccattaaactgaaatgctgttcctttcttatcatccgcaaggtctgttctctttccagtattttgcactacttctgcaaactttgttccatcaaagtatcctgtgtgttccaatgcatacccctgattccgacgttccatatctcgtccaaacagacctcctgcattgtaaattccatcatactgatccaggttcaaagcttccagataatctgcgatactatcatcaattccccaatttacataaaacgcatcaaatccctgagacagtgccgggaaataatatctgcaacttcgtatcgcacagatctgcggaacagttgtataatccgcataaagagccataaaacgcgtctgatcaccctctaccgggatttcaaagataatatctgctttttctactccgtactgtggcattgctgccggaatattattcaccataaccgccaccggacgtttaccgatagcagcatctgtcagatccgcaagacctgtcagcaggttttgattttccggaatcttttcttcttccggttcttccggcacttcttctactggttctggcttttccacttctattttcttagtcggtggtttttctgtttttgtctcttttttcttagagcaacctgaaagagccagaactatcatagataaaatcagtaacaggcacattccccttctttttttctgcccgcctcgtttcttcttcatacactttccctcccttacatttggaatataacgaatattaactgaattaattatatcatcccccagtgtcttacacaatcaaagaggagcatattacgcaaaaagcacagtgaataaatcactgtgctttttgcgtataatcttcacaagttaaatcctgtttataacttatgagtcagatctcattcaattattttgcttttccatatacatacttcggtgttccaccaacaaccttgtttccgttagagtccgtatggtatgggaatacccagtagaagttccaatctgtgctggatgccttcttatctgtaaatgttgtgccttttgttgtcataccgatgtaaccatatttctcgcctggatggattccgtatacaagatacccttctgctccggctgacttcgtccatgtaagttttactccaccctttacagatgaagctttcaggtctgtaacagctgcgcatttctgtgctttaccatatacatagtgtgctgtcagtcctggatacatcttgccattttcgtctttgcagtatgcaaatacccagtaatagttgtaatcacttgtaagtgcttttacatcaacaaaagatgtcttagatgtcataccgatataaccatacttgttaccgcctccgcggattccataaatcaggtatccttctgcgtccttcacttcactccatgtaagttttaccttacctactgaagaagatgctttcaggttttctactgctgcaagtctttctttttcaactacgacttccttagttgtcggattaacaactttctttccatctggtgatgttacagatgctgtataaacaacttttccttcttttgtataagttgctttttcgactgtttcactatcaatcttaacttctggtgtctgaacatgtgttgcatcatttgcacatgtaaatgttgctgttgttgtccacttaccatctttttcttcccagtctgaccataccggatcgccgtatttgtgaccaagttttgcaattgctacttcttttgtctcttttgcaagtacagtattatcatctgttgatgttactgttgctacataaacatcttttcctgcttcttcacatgtaggtgctttatatgcatctgtatcttttactacagatacggatacatttttctgaacttctccacatacggaacacttcacttcatcaactgttactgaagtgccttctttctgatctgtcttataacctgtgatgtttccatcatcatctttaattgcagctgcatcccagttgaattttacatcactatatgtatgctgtcctgcttcgccttttacttctgtagatactaaatattttacaccgtcttcagttttatctgctgctttgtatacagctgttacaccttcatcacatgttccagcatggctgaccatcttagcatctactgttacagctttatccagtgtcttattgatagaatcacggttcgctttattagttgcattatcgtcagatgaaagcaagcaatcgagcttgtcaattttatctgcacaagattcacatgtaagattctggaatgttactgttgagtaatcatcactccattttgcatctgtcggtacatatgtatgaccctctgcttcatttttaattgctgcatcccagatagcttttctcttctcatatgtggaattcgcctgctcgtatttagatttaacaggttctgtaatacaagcaccacattccgggcatacatagttatctgcttcgtttttaacaccatctgtctttgtatagtatacttcatggaatttgatgtaatgatgttcatgtgctgtattttctttttctacacgtgtaccatctttaatcaaaccacaatcagaacaacgttcctctgtaaatgcatcacggccacaggttgcaggtacggaaactgtttcataattatgagaagtacctgtcagtgtcttcatatcaactgtatcaacgaagttagctgaccacatgaactcgtcattatcattgctctgactgcccatgaactgctgatacttcttgtagtttgtataagtcggattgtaatctgtctcttcgaattgataaccataacaaccggaacttgtatgatcaagcaagccagtcttacctgaaatgaacgcgaagtttgtaccgattgaaacaatcagtttgtcacccttcacagtcagacctgcgattggatgatttgtaacagtaaagtctgcactgtctttgcttgttgttgtaaacgccataccgccaaacagctttgtattatcacgttttgcagatactgtattgtattccttcacaacggctactgcaccgtctgcaggattgtaggatacgatatcgttggatacgttgaagtaaatcttaccatctgtgtacagcgctgctgtcagaccgatagatgggtagatgctctgttcatctacgaactgtgcatacagttttgtcagaaggtcgttcttcaccatcttgccgtctttgagaacgcttacaaatgtatcgtcatcatcgtcgttttccttgtctgtgaagttaatcagtgtctcatagtcactgtcgccatcacctgcatccttttctgtcagtttatgacgaacaatcttgtactctgcagccttctggctctgattcatgcttgaactgtttactctgtcaaacaggtctgtagaatcatacatgtagtacgcataaccgtctgcatagtaaacattgcttgccgcacgcgccatccatgctgtctcataggtcttatcagttgcttcgttttcatagagagatctcaaagaactgaaattaccatcatataattttctggcacttgtatcactgaacaggaagtatgtatggttcatatcaccgtctgtctcaacacggtcacggctcataacttctgtgtagacatctgtgtaacaaggatccacataaaaccactgtccatcaacctttactgcattccaataatggtcggatccgaagtcctcctgttcttcgccgtacattgtaacatcagactggaaggagattcttacaaggtcaactgtgtaattctttgaagtgtcaagcttgccatctgtatagtacagttctttggctgtcttccagttggagctgtcatagcctacattcgtatctttcagataaatatccttatccagacactgtacaaggtatgtgtaagctttggagtaaccaagacatacggatgtacccataccgaatgcaccaaactgagaaccttcccaataattgataacaccagttgtcataccggttgcagcctgcttcgcatagattggaatcgcctgcttaaagcttgtttccttcgttccatcaccgtccatatccaatgccggatcatcgctttctaactgctgctgagtaatctgctcaactgtcatcttgtaaccaggcgcattctcaggatcaacctcaacgccattttcttcagcatctttgataaaggcatctgccttagtcttcatctggttagctgcatcctcaccaaaattggttcttacatagccatccggatctttgtcaatggcttctttgttctgcttgatatagccttcagcctgctctttcgcggctgctttctcttcatctgtggcttcactttcagctttgcctaaagcctgctcataaaccgcctgctgaatagccttttcatagaactgtgtacgcaaatcattttcgatgcctgcaaaaatctgatcatggaaattctgtttaatctgaggttcataaacttcatagatcgcattataaacatcatcttcatgctcctgcttctgaggatcctttgcaatcatcggcttgtcatcatctgattccttaccggagttcatgatgtaggacatatcaaatgtattgttatgtgccagccagtcattcagaacaagcagcttctgtgcctttgtctgcgcacctgatgctgtaactgcagcaagggcttcatctcttgcatttgttacatctggaccataatacttaacacctaacttatcaccatatgtgaaagtaaagatcatacctgtcaggtcatcatagctaaccttgccatctctgacatcctgaacagatttgccgtctaaagcaagcatctcaccaaggataccaagaccatctgtatcatcgttgaaatccagaaagaatggattctgaacaccgagtacattggcattggctgaccactgatccagatactgctgatacataccaacaactgtattaatctggtcttctgtcagcttcttggtttcagcctgttcatctgcttcatacaggtctgctgtgctgatgttagattcattggattctgtgccggcttcgccgccaacaatctcaacctcttccagtgcttttctcagactctggatagcaggatcagattcatcaatttccacgtcctttgtcagctgttcagctacagctgcattagcaccctggaagttaattgtcgggatagaaattgtataaccaccatccaccttaacttcattatctccttcttcagccgcctgagcatctgcatcagcagcttcatccgctgtatcctgctcgtccgcctcttcaggagtcgcatcgtcagctgctgtggaatcatcagttgcatcatccgctacagcatcagcttcatctgttgtttcctgaacagctgcggcatcgctatcttcctcttctgctacattatctgtcggttctgcataagcaggagccggaacagatgttgcaagcatagcagctgaaagaacaatacctaaaagttgtgtttttttctttttcatagttctcctttatttcctttcttaaacaatttccatatactctcctctgagcgtcctatctatttctcgctcgtcatcacccctttttcttctttggacctaccctccttccttgactcaaatgtgcctgtaataattataagtaaatgcttcaataaaaataaatagtaagtccgtattaagagtagtataccacctaaaatccggagcgtcaattagccttccataattttacaaattttacaatctgtaagattactcccttcaaaataccaaaagcagatattatgccacattttcattccgctttcacttctttatgtcataatacctgcttttctttatttctgtttgcgcatctcaccaggttctttacacaaagataatatgtactgtccatatggtgtcttacgtaaacggcttcctaacttcttcaattgttctttatcaataaatccttttttatatgcaatctcctctatacaggacacctgcaatccctggcggttctggaatgtcgccacgaaattagctgcatccataagtccatccggagttcccgtatccagccatgcaaagccacgccccagaagttccactttcagttttccctcttgaagatatctgttgttgatacttgtaatctcaagttctccacgttcggaaggctcgacttcctttgcatactgtacaacagaattatcatagaaatataatcctggtacggcatagttagactttggtactttcggtttttcttctatagaaagtacattattgtattcgtcaaattctactaccccataggcttttggattctttacataatatccaaagattgtggctccatcgcgttcattcaccctctgcaaaacaggggagaagctttgtccatagaaaatgttatctcccagaaccaatgccacgtcatcatcaccgataaaatcctctccaatgataaatgcctctgcaagtcctcttggttttttctgaactttatattcaaatctcatcccaagctgtgatccatcaccaagcagttctttgaacacactgacatctctttctgtagtaatgatcaaaacatctctgattcccgcaagcataagcacggaaagtgggtaataaatcattggcttatcataaaccggcaaaatctgttttgaaactgcctgtgtaatcggatacaatcttgttcctgatcctccggcaagaataattccttttctcttcttcatatgatctgctccattcatttactatttacagatgatacatctctttataatagttctgatattctccgcttgtaatgttctccatccagtccagattcttgagataccattttatcgttttacggattcccgtctcaaagtctgtctccggctcccagccaacttctttgcggattttgtccggtgcgatcgcatatcttctgtcatgcccttttctgtcttcgacatactcgatcagattttcattaatatgttctctgcgtgggtcagtttccggaagtacatcatagagcagtttcaagattgtcttcacaatctcgatatttctgcgctcattgtgtccgccaatgttataagtctcacctagtctgcccttttcctgtaccatatcgattcccttagcatgatcttctacatacaaccagtctctgatattgagtccatctccataaaccggaattttctttccgttcaaagcattattgatgatcagtggaatcagtttctccggaaactgatatggtccatagttgttactgcaatttgtaatattggccgggaacttataagtatcaatataagcctttaccaacatgtctgaagatgctttacttgctgaatatgggctgtgtggtgaatacggtgttgtctcataaaagaatgttccatcctcttccaaagatccatacacctcatctgttgatacatggaggaactttttcccttctttataggttccgtcttcctgttcccatgcatttcttgcggcattcaaaagaactgtcgttccaatcacattcgtctgcacaaaaatctccggattcttgatacttctgtctacgtggctctctgccgcaaaatgtacaactctgtcaatatcgtactcctggaaaatcttatttacagcttctgcattacagatgtcttctttaataaagacatagttttcattgttttcaaattctttcagattttccggatttcctgcataagtaagtttatccagattaacaattttaatatccttatactttttaaacatataatgaatataattgcttccgataaatccggctccaccggttactaaatatgttttcattccctgtttccctcgtatttttactattttatctgatctttttctaattttattttaacataccgttttttaatttaaaataattaattggagatttattgttttttctctgcaactgtttttccatcactgtttgcatatcctttgataatccctatcgtcaacacgataaataccgctccgaggatcatgactactgctgtgtaaaaaactgatattccaatcattccatgcttttctgtgattgtttttccaccaaaaacaaacaataaaaaagctaacagatatcctatattcagcagtttttgttttcttgcgacagtaatgatcatctgaagaaaattaacaattgcaagtgcgcctcctccaattagcaaaatcacaagtgctttcttataatctgtcagatccacaccgtaaattaatgacaagacaggaattccaagtaaatatccccctatgatcgcagctacagaaagcaacaggatcaaagcaatctgtcgtaagatcagcttattaaactgactgttctttttctcatgccataaaagagccattttgctgattaccggctgatagacaaactgactcaaaagacttatcacaaagaccggcatgaaaatgtaggtgaaacatgcctgcgcttcacttgacatcaccttatcaatcgcatatttcggtgcatttccaatgtaaatcaccaaataagatgctataaaaagcggaaaacattctacaaatatatttttaacatttttaatttcaaatgttttcttttttatttcaaatcctcttattgccgtataattcaatatcacgaactgaataaatgatacaagcaaagccactgcagatgtcaggataaggtttttgctgaaataataacatactaagtatacaaaaatataagtacacattctgatagacaggatctttccggccacatccaggcgaagatattgctggaacattccatgaatcacatcttctaccgcatcgatcacttttgccaggcagattagaattataattatagattttgaagaattatacaatcctgatgcaagattcactccgacataaacaaaagatgcagcaatcataattatactcgttatgattctcgcaactgtatattctttaaaactatatttttcttcgacatctgacacttgaaactggcgtattccatattttcctatcgccatcataagatttcctatcgcaaatgcaatcgtaaatacgcccgcatcgatcaccggatcaatgcgggatataagcatcagtataaatactgtctggaatgcattcagcattgctgcacatgtattccataagtacgccgacttcattttgtccttactgccaaatagaatcttttttatcataatcctgctcttccatatacatagtgtgctgtaccgcccgctactttatttccattaccgtctgtatgatatgggaatacccagtaaaaattatactcatctcttaatgcatttttatctgtaaatgttgttcctgttgttgtcatgccaatatatccgtaacttccttctcctcgaattccatagacaagataaccttccgcaccttctgattttgtccaggtcaactttacccctccactgacagaatatgctttcaggtctgttactgcttcacatttttgagcttttccataaacatatttttccggtgcacttccggcgagcatatttccttctgaatctttacgataagcaaatacccaataaaaattataatcactcgtcaatgcttttgtatccgagaaagaagtcttgctcgtcatcccaatataaccatacttcccgctaccacggattccataaactaaatatccatctgccctctttacttctgaccaggacagattcaccgcacctatcttggaagaagcttttaaattctgaactgcttccggttttttatttgtagtttctgcaccgaaatccatgttcagatctacttttccatcaattccatcaaccgtaccagaatctgtacattgccacattgaatactctccttggtaagtacaggtagaattgtactgtgcaacccaatggtcaactgtatcaaaataagaatctgtcagataatttgtaaaccagtctttattcgcatatactgccacatcatatcctgcatcttctatgatactgcagaatgtctgtgcaacttctgcgatctcttttgtgctcagttcttccctcacactattttcttccagatcatagtaaatcggataagaaagatcataccctttgatcagacgaagtacatgattggcttcgctttttgctgccgtcacactgtctgcataagaataaatataagtaccaaaaggaattccttcttttgtacatgcatctgcatttgtcttccaatatggatcatcctgacttgtctcatcatctccatatccacaacgtataattgcataatctacatctgttgcctttacttttgcccagtcaatgtctccattccacttacttacatcaattcctttggcaacagctcctgtgatttcttctccctggtcattatagaatttcccgtcttcttcataccacgcatccgaagaacttcgcagatattctgctgtatcagacaaaattggtgttccatctttgtatctccagctgttgcttctgtcttcccgttgtgcctgctgtggctctgttaaatcttcttgtactgatgtactttctgtttcttctgcaaatacagtaacagaaggtaatgtttccaaaaccagaactgtagcaaccgccattgcaagtacacgtttaactcccttattcttcatactttcttcaacctttccatgtctactccgatgttgtcatgctgcctgactgcttcattctcctacaatataccagttataatcataatcttcggattttgtcatatctcccggagcaagtacaatataataatcatttgcatattccaggcgataatcattcctgtgcaggaatttcataaaccagtctttttttccattgtactgattatataattcactttcaatcaaagcatcgtaattatattcctcaaacccataataattgtttgttctgcagaatataacaaccggtttctcctcccagttctcttttgcaagtttcaggtcttctttcagtttctcttccgtataattcggattggtaacccatggctgtacataagattccatttcattcaatgaatacattaaaatagctccgccaaataccattaatggacgttctttctcctcatctaaatggtttatgcaatccagaacaccattgacagcatctgcttctctctctgttgtcttcatatattttaatttatcactgttaacagaatatcgaagtgaacttctatccacactgtcaaaattcattgtgcaataaagcatgtctgcaaatttcactcccatgcagacaagaataatccctgtacaggctaaaactgcaccatgtcggattttcaatccatatttctctgtcattgcattaactgcttcaagtgcggctttactgaaaacaaacctgcaaacggcggatactgcaaatggagcaatgatccaaaatgcaagaatcacgtgttttgttcctgtattagaacctgcaattgtcagaagtggaagcataatggcacagattccaagaataatcagatctggatttccattcttactatacatgttaaaaaatacatagcaaaaagttactacatacaatatacctataaaaaaggacggacctgttgtcatctgcggccagtttggtactgtatttacatcatatgcataaaccaacatataaacagcaattccaatcactactgcgctgaatgcaatattcaggattattttcttcggatgaattccttttaatgaaaacaaaatattcattcctaaaagaagaatcatagaagcagcaagataaataacgcctgaagcaattgcatcaagatttccaaatataaaggtagaccagagattttccatgctataaccgcttccggccgtagatgcaataccagataatcgaaaaatattattgataaaatattcaacctgacctgtaattgccagaaatgctgccagaactccgaacgttgctgctactcctcccgcaaagactcccagatgcttcataaaatattttacatcttcattgttatataaataagagaaaacatagataaagcatgtaaccaatgctgttatactacccattctggaaaatacaaccaatgtcaggaaaattcctgcgacaaaactatatttaaacttcttctcaactacagccttaaattcaaatccaagaataagaatcaggaaaaatacattgaactggtgataattgaaaatattcaaatatgtatctgatgccataattgcaataagaattccgaataatgtctgtaaatcacccaaatatttatgaaataccttatagacagcgaatgccataaccatttccacaattacttccagaagatttaatccccagattcctaatccaccaaatatctgaagccatccccatgcaagtacatttgtcagatagcaggtaaaaccaactttatccggattgctatatatattttcatagttaaacatatgaatcccagtatcacccaggtcaatgccaaagaagctgcaaagaaatggatagagaaaaattcctgcgatcaacacaatcttcgcaattttttcaatttgttccttcttacttaacaactgctcctttttacttaacaactgttctttattcatcctctttcatccttatactctattaatcatttaagtatttttttaaacacacaatatcatatgtatcccatttatatttatcaagatactcaaaccagatatcttcctgattttcaatattttccaatttctttaagaactcttccgtatgttgttctttcggaataattacgactccggtatcatcgcatacagcaatacttccttcatatttatctctgtgttctttttcaattacactgtctaacggttgttcaatgtatttattaaaacagcccaccggactaaatcctttacaccacatcggataattctgcttaatgatatcatttgcatctctcatattggcattggatataatcgcaactgcctctcgatacagtactgcaaactttgttacaagctctccgataattgcacggtcaccacagttaaaagcttcgatcattacaacatctccggcctgcacttcacggatctgttcatgtatgctccagtttgattcatccaatgcgtagatccattttacatttcccaccgcaaaatgccctctgttcaccgcatgagaatctttaaatacgcctgttttccccagacagtctgccacttctgttgtagaaattcgattcattctgatttttcttatgatttcgttcttaatatccatgttttctcctatgattcgaaagatactttcaatgtattctttacttctttttcaatttcttcaattctctcttttgattctgcacgtgcaataaaaaatcctactctggaacgatcatcctgtgccttctctataatatcgccttctttaaattcaagctgaagctgtaaaatttccggaattgcattaatctgctcaacaccttcaattttggtaatcttctttccttctgattcgatatccagaaattccagaactgctgctctttctttcattttctccgcatctgatatatgcagatcttccacagatggagtcttgccaagtgctgcattgatcagcagctgatagttgtctacccctgacataaatggaacaatatcagaagcaattctgcttccacctccacgtgccgccatctcaatcagataataatctccatcttcgaacttgtattcggaatgtgtgatcgcatatttaattcctgttccgctgatcagctcgtcatttgtttttctgagcaggtcataatcaaatgtctcattgtagttcgtaaaaaacaactttgaggctatatttctgttataagcgtaatgttctttctgagagatcgccagtgtatggtgtgttccatcaatcacaataccatccactgtaaattctgtgccttcaatatatctctccacaagcacataatcaccactatttgtaaaggcttccgtctctgcgaatcgatctctcaattcctgttcggattctatcgtaaatattccacggctggactgggaatccaatggtttgataatcaccttttttcccaattctctgtagaactcgattgcttcttctacatttgtacataatctgtactccggatacttaaatttattttcccggcaatactctctcattttaaatttgtttgtaaaaagttctgccatttcatgaccaattccaggacatcccatctgttctgcaacataagctactgttggaacagcaatatcactctgatctgtcaacactgcatcaatcttatattcctttgcaagtgccagattcttctctttgtctcttacatccattacacccgtaaaatccgcgtactcaaatccaatagaatcttcataaagatttgaattcactacttcatatcccaaactttttactttcttaatcagtggaacctgccatgttccccctgcaattaccattactcttttcatcattcgctccgaccttcctttaaatctacaaccttttttacaacaggtcttctccgtcttttacaatactctctattacatactgtggctgattattgatacacatataaattcttcctgtatactctccgataattccaagcactcccaggatcagacctcctaaaaacagtgtaacagccatctgcgatgtatatcccacttgaattgtaggtataatcagttttcttattaatgagataattcctagcaacactccgcatacagaactgataaatccaagtgcacttccgactcgtaaaggtttaattgaaaatgctgtaaatccattgatccacagttttaataatttcttaaaattatagccgctctttcctgttgctctttctctctgtttcagatgaacatttcctatctttcctgatgttctgagtagaagtcctgcaatgtaagggtatggattctgatatttgaccatctctttcactacaaatctttttgccataaaaaaagatgataatcctatctctttaggcttatcaatcatatgatacagcataaattcattcacttttgtaccaaatcttcgaacagccgatttctgtgtagtctctgtatattttgcgcagactacatcatatccttcctgcatcttgtcatagaaatcccagaccattcctaccggtgtctgtccatcatcatctgaagtcataatatactttccggatgcctggttaaaccctgccagcaatgcgtttggctgtccgaaattcttagcaaaattgattccgatgattcttccattttcttttgaaagccgattgatcaatccctttgtattatcttttgaattgtcattgaccagaataatctcatattcaaatccttctctttttttcattgcagcttcaatctcgctgatcacgccttccagattcttttctgaacaatagcatggaattacaaatgaaatatccattcaatcatttcacagatcagattttctaaagtattaaaatccgacctgtgtactcctttctctttatctcgtataagccatctctgtactttttttattttccagacagatactgcgtgccggaacatagacactatatggctctgtattctctttgacaaatgcacctgccccaaccaatgttgcatattccagtgtcctgtttccaagtaccgtactgttaattccgagaaaacaattattctttacaactgtttttcctgcgataacagaatccactgaaaagaaattataatctccaacctgcgattcatgtgaaatctggcttccgttccatataatgttggaatttccaatctttgttccatacgccaatgtaacatgttcgagaataatattcccctcgcccattgcaacactctcgtctactacactcggatgaacaaaattttcgatcctatatccttttcttttcgcatcttcaaacttctgctgtcgaatctgattcattttcttataaccaagcgcaataaccatcgtatattctgttggtggatatgctttttcaacttcttcataagccactgccggcagaccatcataggtatcactttcaagatatgctttatctaccgtatatgccacaatctgtacgtctgcatatttttcaaaataatatcgaagcattttcccaaaatctgtcgtaccaaagatcacacattttctcttcattcttttatcctctgtttttactataccggttcttttactttccactataaaatgcttttactttctccgcaatgtaatctacattttctgcttcgagtccataatacatcggcaaacgcagaagtctttcgctttcagtcgtcgtatatttatcttccccacggaattctccgtatttcatacctgccggagctgtatgcagtggaatataatggaatacggaaataataccattctctttcaagtatccaatcagtttctgacgttcctccagatctctcgctttgatatagaacatatgagcattatgtacgcaatcctcaggaataaccggcatttcaatctttcctgcttcttccagttcctttaaagcttcataatatctattccatgttttcattcgatcatcataaatctcctgtgctttttcaagctgtgcccagagatatgctgcattcaattcacttggaagataagatgaacccgcatccatccatgtatatttatcaatctgaccacggaaaaatttacttctgtttgttcctttttctcttacgatttctgcgcgttcaatatcttccggatcacgaatcagaagtgctccaccttctcccatgctgtaattctttgtttcatgaaagctaaagcagccgtaatcaccgattgtaccaagtgcttttcccttataagaagccataactccctgtgcagcatcctctacaactttcagatcatatttctgtgcaattgcacaaatctcatccatcttacaggctacaccggcataatgaactggaacgattgcttttgtcttctccgtaatcgcattctcaatcagcctctcatcaatattcattgtttccggatgaatatcaacaaatactgccttggcacctcttaatacaaacgcatcagctgttgatacaaatgtataggacggcatgatcacctcatcccctggtttaatatccagaaggattgctgccatctctgtagcatgtgtacaggatgtcgtcaacagtgtcttggctgttcctgtattttcttcaatccatttagaacattgttttgtaaatgctccatcaccacagattttatgattttcaattgcttgtctgatataatcgatctctgttccgacgattggtggtacattaaaattaatcattcttttttttcctcattcctttgaaaacttccatatttgatagccatctaactctttgtataattctgcctttgcttcaggataataccgttcctgcaaatactgcactttttggtctaaagttttccactctgaatccacaagatataccttctcatttattaatgcttttaatggctgttcggcatcatatgtttgtaatatctgattgcaatccgggaaatttgttgttacacctgcaagatataaaacattgtcaaattctcctgtcggaattgctttccacggattccagtcataatagaacacttgcatcattgtctgaaaatccagtaaatacaaattttccttatgtgtttctatctcattgatcagttcttccgacttcgcccctttattgactattttgcgatatttactcgctttatagttccatgactcataaaatgtattctctatatattccttgcgcccccaactatctacatcctgataggatcgatccggtaaataaagcggcaattgcaaaaatagacatactgtatttattataacacagactctcctatattcaataaattctcttttattttcacattctaatttttcccaaaagtaaaagagtgttaaaaatccacctaaaaatactgcatattccgttcgatacacggttctttcaatcaaaaagcaatataaaatataggcaaatccgattccccatatcacaattgctgtccaacaattttttctctgaaaaacaatacttaatattgtaagcaccacacaggcaaggaaaacaggatatccctgtaaaccacggttctgtatctcttctattattacctccttagatatctctacattttttttataatcctgtataatatctgcggccttctgcataatgtctaaagagaagacttcattatctgcaaaattccagttacgcatcatcttataatcattttctgaaattccgattttctgtaattcttccgcgtacgcttcatatccgtaatcacttgcatctacgattgcagcccttgcttcgctatattctttgaagtatttgtattctggatccttattataagaataatcatcaaataacttgcagcctgttactactaagattaacagcagtcccgcactgataatttttctcatctttagccaaaaacgtctgtgatccgtctcatttttccacacccggacaatctctacaataagaataaataaaaggaaaccgcccgcgagataaataatattaaacctgaaccacgttccaattacgcacaaaatcgccgccgatatctctatccgcaacgatctttgttcaaacagcgcccatagaaacacaaggctgcctgccatgacagctatcattgctgttttggtgaactgcataagaatatacgcatcactgccaaacacagtcaataataaagttattaccataagcgccattgatctgttcaattttttcaataacatatatgaaagtattgtaaaactaagaaaacagagtaataactgaaaaataagataccaactgatttctggtaaaataagatagaatggggtcaacagatatccccacaggacattgataaaaatcaaatgtggatttaaactccccccataagctcctgacaaaatcgcagacatcacaaaatcatctgacacttcatatttgacatcacaaaatactaaaattgaagctaaaaaaagaagattcaatgtgatagcagacaatatttccgatttccagatcttactgatacagtttttcaaacttgtttttttcgtcttatccatacttctcaccttcttttttctatttaatcagtttcctgatctctattgttcctatttcttttcgatatagttccctacaatctcccagaccagtttttcttttgtcataaggagtacaactccataaatcccaaagaacacgcatgcgctgattgcaagcattacaaatgactgtatctccatgctccagccagatgattctaaatcaagcaagcccttcactaaactcccaccgatggttgccactacaatcgctgctccaattttcactccactgacatcgcgcatgatatcctttaatatctctttcaaatacacacattgaaccagaagtaccaccaattcagctatcacagtagcaagtgctgcaccggatgatgccatcttcggaatcagaaccagattcagaaggaaatcagcaactgcaccacacacgatagaatttaacaccttctgttcctgattctgtggcgtaagaatctgaatcccggtaatattagacataccgatcaaaagtactgtcggcatcagaataatcatcggaagtaccgcgccctgatacccgtctcctgcaagaaactgaatcgattctgatgcatacagcataaaataaatggtcaatggaagtcctgctacaactacaaaattgactgctttcccgatcattctgtaaaaatcttctgttttttctttcttaatataataagaaagccttggcaaaagtactgttccaagagaagtgatcagcgtaacaagtattgtttttactttaattgctgcattatagtatccaacttctgtattcccctgcatgaaccgaagcattacaacatccagattcgtataaacactggttgcggctgccattgcaaaaaaacgcaaaatcggctttatatgtatccgaaaatcatatgtcccacttttcttaaaagaaacaaattttgttgcatacacaaagttgaacacataagatgcagagctcgcaaatacagtaattcctccatagacaatataatcttccggattatgtaccagaaggaacatcaataccagtgataatagttttacaaccatgttgcataccgtaatatacgcgtactgctccaatgcgttatatagccatgtgatagcaaacatgtttagaaccattccgattccgttaataatatataattctttttctgctgcaaactccggcactaacgctactgtaactacgaagacgatacaggttaaaaacatcgtaattgaattgatgatcaataattcctgcactgtttttgacaatttttctttatcatctcttacttttgcgcatgcccggattccataggttggaatccccaaagatgcaaacatattgaagtatgttataacagcactcgctgttgccaccttaccatttccggttgccatcaagactcttgaaatgtacggaaatgtaatcagtggaaatacaattgaagatgctgacataataaaattcatgataaagttaaatttgacagagtgaatcttcatattacgacctttctttaaccatttcgcaccttactcaaccggacgatcaacgagtaaaatctaaatccggattttctcaagagacgcagcattccgctaaattctccggatttttcgtaaacatatgcatttttttcttttacttctgcatcaaattctttaaattttttctgtattactttatctccagaaccaaagcttataaacacatctacctgtccatgcaccatttccgctattctgcgtgccatatacaattcttttaatttatcataatctgctttttctttgtaggcattaatataatcaagtacatgaaaaataacgtcaatatgattctgcatatgtttctgatatcccagcatgctcacactctgattcacctgtgcaagacggtacatataaacaaaaatatcaaaataaatcacattctccacatacggaattggatacaaaatgtactctacatccacatagaaactgtgttcgtctaaacgaatctgattttcttttagaattgatgtttttaaaacaagcgcatgcatagagattctcgtctcattcgcaatcatctcaaacggcatctgttcttcttttctaattcccggaaaggtaactggatttaattcgcctgttacgtcattcacttcataataattagtaaatacatagtctgcatcgcatgttttcaatctttgaatcagttctgcaaatccatcctgatctacccagtcatctccgtctacaaccttaaagtattttccttttgcttcaccaatccctctattgatcgtagaaccgtgccctccattctccttagagatcacgcgaaacgtatctggatatttttcttcatactttcttccgatttctgctgtcttatctttcgaaccatcatcgacaataagcacttcaatatcatccaacaccctctcatccacaaaggagtccagagtgttctctaaaaatttttccacattataggaaggtactgtgaccgtcagtattttttccaccttttctacctgctttccgatttttacagttttgttgataccattcttctggctttagataaaagacgcatcagccaatactgtttgtaattcaatatccataaatgaagcttatcttttctactccattgatttatgtatttattattcttaacattcccaattcttgactttgtatagtctctgtacttctgaagatatgtcccatcgtctccctcaagtacaagttctttcgatggttcaaaataagcatttgccaaaactagatattctaattcttcgcggtaagtttcgtattttccactttcacgatataccgacaatatatgatctattacttccattttatcatgactgcttttctcatgatttttccctgtcataattgaattttcgcgaataatataataatataatggttcttttaaataactgattctttccgctttcaggaaaaatatcggtgttgttgccagatcttcaaaatataatccttttgggaatggacaatctgctttcacgtaaaattctctgttgaacaattttgcccaggctgccggtggtgcaagcaataatttgtgttccttctctaaagaaatcacttttccgccaggaatctgtgttgtccgaacttcctctatcccgttttccacgcaataataatcaaacagaaccatatcgcatgccattttttcagcttctgccactgctttttcaaccagatctttcgctatgtaatcatcactgtctacaaatagcaaatatttccctgtagccagttttacgccggcatttcgtgcatcacttaatccaccattctgtttatgcagcacttgaattctattatccttttgagccagctcttcacacatttcaccgcaacgatccggcgatccatcatttacaagtataatttccagttcctgatacgtctgttcgcagatgcttttcacgcaacgttccagatattgttcgactttatataccggtacaactacacttaccagttccactcacattacctcctgctgactgctgccagtctgtccttcattcttctcaactgagacatcaataccattattccatacattcgatactgtaatagtttcaagaggatcttatcttttcctgctatctgctgcacataataattcttattcatctgtggaaatttattgtatgcataatctctgaacttcttaagatattcgctttttctgtcatttaatacgatttcttttgatggcacgaaataggtattttcaaatacgagatattccagttcatttctatatgtctctataagattttctctttcaaaatattcaagaagttgatctaccgcccatgtacgatcttcataattcttttcaaaatttctgctgtgcataattgatccgtcgcgcataagataataataataaacttccggcaagtacacgatctttttcgtctttgtcataacttttggaatcgttgccaggtcttcataatatctcccctttggaaattgaaagccactttctttccaaagctctctgcgaatcagcttatttacagccgaacaggatctcatgatcaattctttttcttctgcaacctctatcacccggtttgctgaaaaaggaaatgtaaaccgatctgtcagatttccattttcctcttctccgatataatcaaagataaccatatccgcctgatttttttctgctgtctctactgtatcacgcacaagattttcatggattctatcatcactgtcaacaaataagagatactttccttctgccttttccacacctgcgtttctcgcatctccaagtccgccattctccttgtggattacttttatacgtccatcccgctctgcatattcatcacagatcacaccacttttatctttcgaaccatcatctacaagaataatttctaatccctgatagctttgcccacatacactctgaatacatctggcaagatatttttccacattatagacaggtacaattacacttacaagctccatattttgctcctattatgatatagtaaaatgatcagttcactttttctaattatagtttagcgaatcaaactcttcaattcctgatcctgatttgcaagatcatactgttctgcattatcaaggaattctgctgattgtctttccattctgttgtctaaaatttcctcagcccagtattttgcgcctgattttagaggaataaaataacatgcttccgttattttagattcttttgttatctcatcactcataaaacacggtaaacctgctgactgtgcctcgattcctgcaattggaagtccttcaaaattagaaggtagtaaaaatgcgtccattccctgatacagatagtccgtatcacttcgtcttccaagaagttttacaacatcttccagattcttttcagcaactatttgtctgactttttcaaatctgactccgtctcctgcaagaagcagaactgtgttggaatcttttttatgaacttcttcaaatacatctagaagaaaataatgattcttctgatagcagaagtttcccacatgaccgattacaaattggtcagttatccccatactccctcggatttcttctcttttctgcacactgtacttatatttttctctatccacagcattatgaatcacacaaaattttgatgagctcactattttttttggaaataaccattcaccggctttcacagaacatccataaaattctgttccgtatcgatataaaaacaagcggcagaacttatgaatcccgttaaatagatttctctttaaagcactttcacagtcatttccactggaatgactgtgaatcattcttctctccacccccgaatgctttgcggcaattgccgcaatacagtcaatagctgttgagatattcagataaacggcatcatactgcccctctttcataattctacacacttgccgatattgagacaccggatgtttcaaattggcaatggcatataaatttgaatggcatttttttaattctgtctgtaactctacgtcaatttcgttcgtgagaaaatcgatcctcacctcttcatttgacacttttgtcaggaaattcaaaagatatttatcaattcctcctgattttccatccatgataaatcctaccagaagctttttcatcccttttcctctctacgaacctgatatgaatattgtaccagataaccactgaacacccataaagcaaaagcacttggggaattcgtatagattccgtctaataaaagcaacatacttataagtactgttcctgccacagcaagaattgcgataagatacaaactatcactgtccgattccttaaagaccggaactaaaacatattgtataattctaaatgtgatcaaaaggaaaagaacaaatccaaggattccctgaaatgccaaagtattaaaaaatgcattgtgcatactcgtataatcacccacttcattatttacagcatatgtctccggcacatgttcttttgcatatgaaataaatgtggaatacccagctccgtatataggacttgtctgccagacttctactgcacttttccataacgagattcttccattggtagcatctttttcaatattctcatgtcttgctgtctgaatcttgtttcctttcttcgttttcgtagaaattgtagtctgaggttttgtagtcttctgtgcagttttatttgccacttcagtctgatacctggtattttctgtctttaatacctgcatttctccaactgacacaatcataatacacaatacgatcaaaagatttttaacatatctatacttcttgttttcattcttcctatgaattaggcaaaaatataaaagaaatcctccacacaaaacaaaagcgatctcaccggttcttgaatctgaataggttacatatcccaaattaagtaatgccgcaattacataaaaaagtttctttattcctttctgctgaaatatgaataaaacagccaggataaaacctatcacactaaaaaccgctccataattagggtctgtatatacgccccataatctatcccaggtatacccggtaacaatgaattccccctccggtgttgtaagatattccgaataagattgaaccatcataacaagacttgttacagcagatacagacgttacaataatcatcaagtgtgaaagaatattaaattcttttctgtacttctccgtgtcacgatccagatcacatacgtataatgcaaaaaactgaattcctgtccagagaatccatttcagattatctgtcatgccatactgtctattcataaatgtactaagcagaaaactcagacaaaagaatatcatcaatatcagacatggcatttttctatatttcttccagtttataatgcggaccaaaatcacaaataatcctaacactaatgtcaatttcacaaggattggctgtattggtgatatataaattatagaaataaatgtcgcaaatgccagacatagataactgatcttaaatacaagttctaatatttcttcatagttctgttttaatttgtccattagatcccctttgcacttcgtgtctatctcattagtatctgtcttgctagttcctgttctgatttttctcaatcaatcctcgaattaattcttctatttttcggtaagactttggtctgtcaaactgctcttccgcaattttgcgtgccttttcacccatttttactcttgcttcttcatttttataaagcttctcaatcatatccgcaagaatatttacatcttccggaataatattcacaccaaagccatcgtttttcaccttcgcacggaattccggactcatacaggtattgatcattggttttcctgctgccagataatctccgatcttcgtgacaatgctttgtggagccttcttaacaaaagagttcaccagaatatctgatttcttaagatatgctgccatcagatcataaggtgcatatccaacaaattctacatttgatatcttccttgaatttgcaagttcttccaattcttctttcattggtccaccaccaagaatttttatcttaatctgtggcataccgcgttttgcaagttcttcacctgccaaaaccatcgtacggatatcataactcgttccgatcgttcctgcgtacgatacccagaattcttctttatcttttacaatctcagctgtccgctgtgctgctcccgcatcgaacaccgtcagttcatttcccacataaactgtttctctcggaatatctctgttccgtcttttaaacgggcggtcacggtattcatccgatgtaccgatcactccacttgcaagtctgtaaactttctctgcatctcgaagcagggaataaaaaataatatcacttatcaccggaatatctattatcatcctcattgcttccggccaaagatcattcacatctgcaacaaacggaattcctttcttctttgcatattctgctgccgccagtgctacgtcattcggtggaatctcagcatataaaagatcatagtctccctctttctcaagaagattcatcaggttctttgctgcaattctatgactatagattctacgtagatcaatatttttcttatatcccggctcataaatgaacttgaccccaaatttgtatttttcatttttaattttttccagatcacgctgtgctttttcccaatgctgaaaggttgttgtaatcagatcaacctgataaccagcatctgcgaggaattcacagacagagcgaaatcttgtatatcctttttcatcatccagacgaattcccattgtaataactgctactttatacattatttttctcccgcttgatatttctttctatgatctatctctccgacttcgtctttgaataaatcacaggcattcctgttcgcacaatatgcaccattcttccaagtgctgtacacaaaaatgtggaatgtgtgttcaaacattttaaagtaatcttaagtgccttactgtccttcgcttctgcttttggaagcagctgctgaaacagcggatcccggaatacttccctgcaaaattgctttcggtcttttgagttcattcctgactgatgatcgcaatttctttctaaggctgaaagaatatatcttccatacagtcctccaagaatagcaccgtgttgaggcgtatctactctccaatacctctgctgattcagtaacatttcaatacgtcttctgtgaagcggataataatccggtacaaacttagttgtcagacttcctgtcattcttttcgcataatgatacggtgcaatattcaataaattcattgaatcaatatcattacaataattaatattaaatacgatatcctcaatcaatctgaccgtttcatagcgaaatttattttctttgatatagtccagatcatacactttattccacgcataaccataaatcgtctcctgttccaatcggatcatataattatggatttcttcaatatccgtaaaatatttttcttctggccggatctcatgggcataagcaaagcttccatcttcattgtaatattcttcaagatgtccaaaaacaacaagttttgctctgtttttttctaaagaatctgccacttgttgtaaaaggtccatgtctactgtatcatccggatccataaaccagatatatcttccggttgcatgttgaatccctgtatttcttgcttcactgagccctttattctgttcatgatgtatcacccggattcttgcatccttctcttttaatttctcagccagacttcctgttttatccggagatccatcctctacgataattaattcccattcctgaaatgtctgggattctatactctctaccgctttggcaagatatttttctactccatatgccggcattacaactgtaaataatgggcgtgtcttactcatatcattatccttaatcatcttttctctataacatcacgattcccgcagacaaatttctgcctgcgggtttctctcgttgtctattactctgttgttgttccgccttccagagtttctccgttctccactttatccatagcttctttgatcgcgtctacagactcctgatttggctgcattacatataaaggcttaccggaataagaataacaatactgagtgtctcctgttccatctgctgccattgatgtaattgtccattgcgggttctcagaaagctgggttttgatcaattcctgaatctgagcttcagacatattcgtttcaacatttccgcttacactgttcaagattccatttgctcctgtcaaaattgccggagataccatcttcttgatcattgctgtaattaccgcctgctgatccttaccgcgctgattatctcctcctggtacattctgacgctctctcgaaaatgctaacgcctgttttccgttaaagtggttggttccctgtacaacatccatcacaagtcctgaatcttcacttgttgtaaaggcatactcagattctacatctactccaccaagtgcatctaccattgtgatcagggaggtaaagtttactcgcgcgtagaaatcaagattcgtatcatataacttctctaatgtcttcatagacttatccacgccatagattcctgcatgtgtcagtttatctttctgtccacctgaaacctcaggaatttcgacataataatcacgcggtgtggtcacaagcaggatctggtgtgttgttggatttacttctgctatgatatttacatcacttcggctgtttgtctcaattgctccataaacatcaatgccactgatgtatacactgaatgtatcatttttcacttcaacatcagatgaggtatcttctatctcagtcttaatgtcatgggaataaatcacttttgtattatcttcatacccttcaaatgcttcttcaagaactcctgtaaatccctgattataaataatcgcatctacttttccatcatgaagagcctcggcctgttctgccaatgtatcatactcttctgtcttaatttccgttccgagttcttcattaattgcctgaacagtctgtttaatctgatctccattcatcttatattgtacaccaaatgtgtaattttttgcatctttgattgcctctgctgaatcatctgccataacagatacaactactttatctagtttatactctccaccagagattttggaaaccgttccacttaccttgaacagataatacgaactaaaaatcaacaatacggtaatcaatacgctgataacttttcctgtaatcgcatttttcttggaaaagaactggcttgccagaataactccccaaaacagcaccaatgctacagttgctgcaacaacatactttgtcggaagcatattcaatttaaatatgcctgccataaaaatccctgtcgcaataagctgaacaattgccagaactaatccaattgttctgctgagtttattctctctctttttcacctttctccttcggcgatgtctgtcagatgtattttttctattggaatgtcttttctttcttcgcacatcatttctttcatcagaaggtctcctgcgccgagatcttttgtcctgctgactcatattctttagtttccttccctgtaaatcattctctatgtttctatctgtcgctttctaatggcactgccaaacgcaatttctacgcttaacagcccatgaatactaatttaatataccatttcaaccttcatttcgcaacataagccttgtattctaaaaaaatcttaatctttttgatctatttaaaatacttttacttcctcacgaaattgttgcttttcttcacaatcattcaaactttcaatcagttctgctacaacttccgggatctccggtctgaatttcatataccagtcaagcgtctcgcggatgtatttcttgcgaaacttctcatttgcacagaatgcactctgcagattatgaagacgatctgcccctttcactgcatatgccatagaatttgtcttaatccctgcaatataggtctccatacaatattctttttccttcgtcaccagcttcactgcttttaagacatcttctcccccgatttctacaatctcctgttctgaagcatctgtatcctctaaaagatcatgaaatactgccgcaacccgatattcaacctgcttaccatcctgtcgaagaatctctgcaactgcaatcggatgtacaataaaaggagctccacctatccgaaactgtccttcatgcttcttcttcgcatactccagtgctttctggtatatctcttctcccatgatatcctcctttgaatcttccatatttctgtatcatccgtccagtatcttcctgttatttcgataattttagtatacgttgtatttctcgtaaatgcaattctatctctttaaactttttcaccaaaacgctcaacttatgttataattagaaataggttttaagagatttttatatctctgactctttatcgaaatccgataaaaatccgaatcaagaaagtgggtaacaactatgtgggcttacaatgaaactttttatcaaatctacccgatcggattctgcggtgctccggtacataatgacggagtaacagaacaccggattcttaaaattggtgaatgggcagaatatcttggtgatcttggaatcggttcaatcatcttgaatccgattttcgaatcagacaaccatgggtatgacacaagagatttccgcaagatcgactgtcgtcttggaacgaacgaagactttaaagaagtctgtgaaaagctgcatgataacaatgtaaagatcatgctggacggagtattcaatcatgttggacgtggcttctgggcattcaaggatgtgcaggagaagaaatgggactctccgtataaagactggttccatatcagcttcgacggaaacagtgcgtataacgatggtttctggtatgaaggatgggaaggtcattttgaacttgttaaattaaatctgcagaatcctgcagttgtcgactatctgcttgactgtgtcaagatgtggattgaagagttcggcatagacggactgcgtctggatgtagcttattgcctggatcataatttcatgcgccgtctgcgcagcttctgcgaggaactgaaaccgggatttgcactgatcggtgaggttctcttcggcgactacaacttaatcgtaaacgacgagatgcttcacagctgtacaaactatgaatgctacaaaggaattttttcaagcttcaattgcatgaatctgtttgagatcgcacattctctgaatcgccagttcggaccggagcagtggtgcatttatcgtggaaagcatttgatgacatttgtagataatcatgatgtcacacgtatcgcaagtatcctgacgaacaagaatcatcttccgcttgcttacggtcttctctttggtatgccgggtattccgtgtatctattatggaagtgaatggggcgaggaaggtgtgaaagcaccggataatgactatgcacttcgtccatgcttcgaagagccgaagccgaatgaactgactgatttcatcaaagaattgattgaagttcgcagaaacagtgatgctctttgcaatggttcttaccgaaatgttgtcattacaaatcatcagctgatctttgaacgccgcactgataatgaacgtgttctcgttgcgatcaatgccggtgattcagaatttactgccggaaatggtgaactgcagggcactttcacagaactgcttgtaaatacagacgaagcagaaactgtaactttaaacggacagctgacaatgccagcttacagcgtacagttcctgaaagctgtataagattttactgattaagtcattagaaaaaggatgagtggtaatgtatctcacatttaccattcatccttttctttttataacttcttcacaaaaagtgtacgcatcgcattgagtattgcaagtaccataactcccacatctgcaaagattgcgagccacatatttgcaattccaagtgctccgagaatcaggcacgcgccctttactgcgagagcaaatacaatattctgatatacgattccgagacatttcttagaaattcggattgccttaacaatcttcaacggatcatcatccatcaggacaacatctgctgcctcaattgccgcatcggatcccattgcccccatcgcaataccgatatccgctcttccaagaaccggtgcatcgttaatgccgtctccgacaaatgccaggtttgccttcgccggcttctcagccagaagtctttctacctgctccaccttatctccaggaagcagttcgctatgaacctcatcaataccaagatctgctgccacctggtctgccacctgtttcgcatctcccgtcaacatgattgtcttctgaattcctgcctgtttcagtttcgcgattgcttctttagaagtcggtttctcaacatctgaaatcacaatgtgtcctgcatattcgccatcaattgccatatgtatgattgttcctactttatgacatgatttatatggaataccaagacgatccatcagcttaacatttcctgctgcaacgcttcttccgtctactttcgctgtaattccgtttccactgatttcttctatctcactgacacgggaacgatccagttcttttccgtaagccctctgaatactcttgctgattggatgagatgacgcactctctgcaagtgccgcatactctaagagctgcttttcttccatctgattatgatgtactccgaccacttcaaaaattccctgagtcaaagttcctgtcttatcaaaaacaacatattttgtcttggacagtgcctcgagataattggatcctttcaccaaaattccctcatggcttgccccgccgattcctgcgaaaaagctaagtgggatgctgataaccagcgcgcacggacagctgattacaagaaatgtcagtgctctgtagatccagtcattccactgcggtgcagctcccattgcaaacattctcacaagtggtggaagcactgcaagtgcaagtgcgccatagcataccgccggtgtataatattttgcaaatttagaaataaagttctctgatcttgattttctggatgtggattcttctaccagttccagtaccttggataccgttgattctccgaactcttttgttgtacggatcttcaacacacctgtcagattgatacagccactgatgatctcatctccggctttcgcttctctcggaacgctttcaccggtcaacgcacttgtattcagtgtagaggttccctctacaaccacaccgtcgattggcactttttctcccggctgaacaatgatcactgttccgatttcaacttcatccggatccacctgttcaagacttccatcctgctctatgtttgcataatccggacggatatccatcaattcactgatatttctgcggctctttccaactgcatagctctggaaaagttcaccgatctgataaaacagcataacagcaaccgcttcattaaagtctccggacttctcataaaatgcaatcgcaatcgcaccgaccgtggcgactgccatcaggaaattctcatcaaatacctgacggtttaagattcccttccatgctttcttcaaaatatcgtaaccaacgatcagatatggaatcaaaaataatacaaatctgataattcctgttaccggaaggaaattcaatagaatcaggagcaccgccgcagcgatgatcctggtcagcatcttcttctgcttcttcgtcattcttctcaccctcttacaggtagatctcgcaatcgtcctctaccttcttacaattcttcagaacgtctttcataacgctctttgcatcctgtccctcttcaaactcaacgatcatcttctgtgtcatgaaattcactgttgcattctgaacacctgctgtgttctttgctgcatcttccatcttatttgcacagtttgcacaatccacttcaatcttataagtcttcttcatctttctcttctcctttgatcttgttttttgactttcatcaaacatgtttcctattcattttcattaaacgattaagcattcgtttaatctttatatttacattatagccaaccaaatgaaaaagtcaatacattttggtatttttatgttacaatacctttatgattatagagttgccaaaggcgctattgaatttcaataccgaataaaaggagattgtttatgactgaccatattttaccacataatcatggtgaacatctgaatacagaacttcttatagataatattgcaaagacggaggacttccagattgttgctgacctgttcaaggtcctcggagataacagcagggtacgcattttctggcttctctgccactgcgaagaatgtgtgatcaacatttcttccatgatggacatgagtagcccggctgtctctcaccatctccgccagctgaaatcttacggactgatcacaagccgcagagaggggaaagaagtttactacaaagcagcagacacaaaccaggcacagctgttgcatcatatgatcgagcaggtgatcaaaatcacatgtcccgaagcttaactgttattactgcaatatcacgcaattaaacaagtatatcaaaacggaaagatatgaatttctcagagatattcacatctttccgttttcttactgaatttattcacattttgtaactgttcataagaaagttttacacttcaccatttttaaacttaatgatcatttcattcgtcaaactgtctctgctcggctccaccggaatctcatcccttcggaaccattctgccaaggccagttcctcgcggtcgagtgtgatttcttcctcaccatccagatcacaatagaatcccatcaggagcgtatcactgaaagaccatggctgacttttatagtaacgaatatttttaactttcagcccaacttcttccattacttcacgctgaacagtctcctcgattgtttctccaatctcggtaaatcctgcaagaagtgcatattttttgtatgctcttccggcatattttgacatgagaatcttgtcaccatcagttactcctatgataactgccgggcagattttcggaaattccatattaccgcaatggtcacaacgcatcatacgttctttctcatcgtgtctcatccgatgtccacaacgcccacagaacttgcgattacgataccagttgttcaactgataaccggtaattccggcaaatgcaagatactgcggttctgcataacggaaagattctttattctccattgtaaactctgacaaccgttcacgactaatattctgtaccagataaaagcgttcctcgtcaatcgtaaacagataaactgcttcttcataaatttcttcattaagccgttccaggtcacggaatcgtggaaaatcaattccatctttccttttcttcagcagtgcactttgtccttcgtaatacaatgcatagctctgtgcatccggagggcatggtctgtactggttatcaaactgatgtggctgtatatcctgaatcataattctgttccttctttcttaaacatagaaccaagaacccagagtactccgcctgctccgattgcaaagtctcccaggttatatgttacttgatccaacttttcctttcctgtcttaactccgatgtaatcaacaaccttctctttctgataacggtccgttaagttactccaagcacctgctgccgcaagtgtgattccggtttttcttaaaatattgctgttccctagaagtgtcagcatctgtatcactgtcacaatacctgttcccacttctgtaagctttttcactttctttggattattcgcaaatactcccagacagattcccggattatgaatacgtcgaagttccagtttctctgtcagtttcctcttttcacccatcttgagattcttttccacatagtgctttgcccattgatccacaaggaataccgtggttccacccaacggatagaatttatttttcttcacgctatcatctcccagtcatttcatattacaattcaaagtacctgttcccggcaacaatttctctacagcatttccagaaaatctttttctgaaataatcggaactccgagatctcttgcctttttattttttgaagatgttgaatttacgtcattgttgatcaaataatttgtctttgatgtgacacttcccgtcaccttaccgccacgtttttcaatctcagcctttacctctgcacgatttgcaaaatgttcaacacttccggtaataacaaagttcactccggcgaatttctggctgtcttctgttacttcctcttcttctaattccacttcgctaagaagtcgcttaaagatttcctgatgctcttcctctttaaaataatctacatagcttttcgccatgactgctccgacaccctggatctcaaccagttctgcctcttctgcctgaagcacgcgttgcgaatcatttccaagtgcccggcagattaccttagcattcgcacttccgattcccggaattccgagaccataaaccagtcttgcaagtgttgtctttcttgccttttcaatactgctctgcagtttcaggaaagatttttcgccaaagccatccattgtcatgatctcatctctgtagttatcaagatggaagagatctgtaaagtctttcacatagccgtggaaaatgaatttctccagtgttgcctctgaaagaccctcaatattcatcgcatctctgctcgcaaaaagtgcaaaggacttcacatgctttgcctgacacttcggattggtacaatacagcgtctttgtctcattttccatagagattttcgtctcacctccacagaccggacaaacttttggaatatctttcactccacttcttgtcagattctccgcaatctgcggaataatcatgttcgccttgtatacctggatctcatctccaacaccaagttcaagttcttccatgatgctgatattatggacgcttgcacggctgactgtcgttccttcaagctctaccggctcaaaaaccgccaccggattgatcagacctgttcgtgacggactccactcaatctcaagcagctttgtgttgcggatctcatctgcccatttgaaggcaaaggaatctcttgggaacttcgctgttgttccaagggactgtccgtaagcaatatcatcatacacaagcacaagaccgtccgacggaacttcgttgtgctcaatctcacgggcaaaccatgccacttcctcttcaatcgtatctcttgtcacttcatggttctccacaacatcaaatccctggttttcaagccactgcatctgatattttctggaattctggaaatccacgccttctgcacgaacgagtgtaaatgcgtagaatcttacatttctctttgcagtgatttcattattcagctgacgaacagaaccgctgcaaagatttcgtggattcttatatttcgcatctacatcctcaatctcttcattgatcttctcgaaatctttataggaaataactgcctctcctcgcagtacaagttctccctgatatggaatcttaagcggtacatttttaaatactttcgcattgtttgtaatgacctcaccgatcactccgtttcctctggtgactgccttcgcaagttctccgttctgataggtcagaacaacagtaagtccatccagtttccaggagattaatgctttttgtccgcctaggaattccttcagcctttctacatctttcgttttgtccagagaaagcatcggacgctcatgacgctctttcggaagctcactgagtacttcatatccaacatttacagtcggactgtttgccattctcgtgccaagcttctcttccaactcctgcagttcatcatagagcttgtcatactcgtagttgctcatgatctctgtattttcctgctcataagaacgtctcgctctgttcagaagttccaccagttctcgcatgtgattcatttctttctgctcatccatcatcacttcttccctttcccatgtctcgttctattatcttgtgttgctgcccactgttcctgatattttccaccgggcaatgcagaagaatctttcagctgatcatataattcgttcaattcctgatctgttagttttctgtactgtccatccttcaatccatccagtgtgatattcatcacgcggacgcgtaaaagatccttcacttcatatccaagagcttcacacattctgcggatctgacggttcaacccctgtgtcaggattatggaaaatgtatatttaccgatttttttcactgtacacggacgtgttacggtatcaagaatcggaactcctgctgccatcttctttaagaagtcttccgtaatctctttatcaacagttactttatattctttctcatgtttattggctgcacgcatcattttattgatgatatcaccgttgttcgtcatcagaaggagtccatgagaatccttatcaagtcgtccgatataagtcacacgcaccggataattcaggaaacggacaatgctgtccctctctctgcgttcttctgtacagacaatcccgcgcggcttattcactgccagcacgatcatctcgtcctgtttggaaacgactttatttccaactttcacaacctgtcccggcacgatacgcataccggtctgcgcacgctgtccatcaactgtcacgcgtccagtctcaatgaggcggtctgcctcccttctggaacacacgcccgcctcgctcaaatatttattcagccttaccggctcactcttctgtaaaaattcttctttgattcgattactcaactgcaaacactccacttatattattgtctttgaaaaatgtatttccactgtataaaaacagaacctctgagattctgtaggaatccataagatcattgatcgttccgctgtaatatctcggatccacaactacgatttctctgtagtatggtgtcaggaacgggataaatgaatttgcgaaggaatctttcacaaggagaagacgctttgtgcttgtagaaactgtacggatatcaagaagggatgaatttcctcctagaaataccgtatactgatctttctcctttaatttagaagaatcatataaggatgtggaacgctttccttcatccacgtaatccacgatcaagtctgtatcttcttctgtcggcacataaatatcaatctgttccttctctccaagattcactccgctttttgatgccagcattccgttaaagctgtctgaaactgcgtaggaaacatagtttcctgaaagatctccttcaatcccaagggatggtgctgccgcctgaaatgcataaaatgcaccaagtgtcgtccagtgatgatctgttttgtaataaatcttctctgtcttatgtttattcaattccgttgacacgtcaatccactcaacgctatctccaagatccttacgaaccatactgaacatctgtgtctgatcctccggcttcgcaagtgccggaagggaatgattcaatacatttgctgcatccggaacaagcatcatacgaaccggaatcttggactgactctctgaaaatgatttgattgccttaatatttgcggcaagatgattctcatctgcaacttcaatctgttctaaaagctgcccattcgttccgatatagacaccgttttccagacgacttccaccaatccggtccaccgtaactttcagctttctccacatgtctcttccaacaaactgatcatccatataagcttcaaatttttcatcataatctccgcttatcagactgctcaggcgaaactttggcttcgttgcaagcatacggttctcctgcactgatttttctctgtcaggcacaataacatttataataaggaatagaaacaaggtcagaataaatataataccaaccaatttctcctgtacttttctctgtctatctttcttcatcttttcaccttaattgttgtcgttcactgttttctataactctctagaatctaaagtacaaaaacggattgtacgtatctgcgatcagataagcaactgatattgccagcattccaaagaaaacaaccagtgtgattacagtccgtactgtatgattctcagacacattcaggattgcacggagcattcttgatccaagtgttgttgatccaattactgccaacaagtagaacaaccagtgtgtcaggatcacaaagaatacttctttactggcaaatcctgctccgccgccaaccattgcaaagaggtaacgaagtgctgctccaaggcttggactaaagaaaaacacccagccaaccagcaccagtactaatgcataaatatgctgcaatacacttggccaccgatccacgattgccccccagacatatttctccagtacgagaactactccataatagattccccatacaataaaattccatgcagctccgtgccacattccggtcagcatccagacaatcaaaaggtttacaatatttcttgaaatcgtcacatgatttccaccaagcggaatatatacgtattcacggaaccaggagctcaaagaaatgtgccatctgcgccagaattctgtaatacttttagaaatatacggcacatcaaagttcttcttaaactcaaaaccgaacattcttccaagtccgattgccatatctgaataaccgctgaaatcaaaataaatctggaatgcataagtaatacatccaagccatgccatcagaactgtcaggttacttgctgatgtcgatgagatttcttcaaaaatctttcccagtgtatttgcaagcactgctttcttcgaaagtccaataataaagagcatcgcgccctgtcccaactttcttccggagattttccttgcagtaagctgcttctcaatatctccataacagacgattggtccggcaaccagctgcggaaacatggatacatacagcgcatacttcaccagactctgctgtgcttttaccttgcctcgatatacatctacaatataggaaatttcctgaaatgtgtaaaaagaaattccaattggtaatgccagttccctgtacggaatactgattccgaacaacgtattcgtactttctaccaaaaatccaaaatatttaaagaacacaagcagcacaatatttactgttattgcaaagaccagtgaccgctttgctttcgcctcattctcactcttattctcaatatccattccgcaaaaatagtttaacaaaatgctgagtatcatcagaatgatataaaccggttcaccccaggcataaaaaatcagactgcctgcaagcagcaggagattcttccattgcggcggtgcaatataataaactgccagcatgatcggcagaaataaaaacaaaaatgtaatactactaaataacatctgctcccccttctacagactcttgtcaaatgcgctgcgatattcagaagctttcgaagatactgcaaaaaagatatatcttccacgaatactttcctgtgagtcctctaaaagcttcacctgttccggcaggtaagaatcaaaatcttctattctctgtgcttttctctgtgcgatcgcatttgtcacattttctatctgtgcatcatttttcacctgtatcaccagaacttccgctgctgaaatactggacggagaagaataatacaaaacacccttgtaatctgcactgttcagtccataatttctcttgagcatctggtcatccatctgcacaagttctttactgtccaatacactgctcagagcctttgatacttctgaaaaagcccgcttacttccacttgcatatagcatcaatatcacaagatatcccacgataattactaaaagtatatatttcatcgcagagatcattcgctgtcttttctctgtcatagcgttgccacctccgccatcttttctgcccagattggatagaaattcgccttaaaatgaattccatcttcttcatagtactcatcttctataatatctgaattatcaatgtatccgatctgcttcttttcacacatcgcttctagtttttcattgtaatctgcgatatttgcaagtgccggctccttctctaccgcactttcctgcaccggaaaaacagcattcacaaaaatatgcgcatccggcatagccttctgaatcttcttaatcacatctgaataatccttgataaacttgtctacatctccgtttgtcttagttacatcattcatcccatatgccagaaaaacaatctgcggatccagttgttttgcctgctcgatctgatcatccagttcgctgaaatgaattccaattttcgcaacaacacttgatgtattcagtacatcatactctgtaaagctcgccgcaatggaatcgcccatcacaacagcaccggaaaagcgttccttcatgcttcttgtatcggatgaatctcctgttccatctttcttttccaactgattaatcttctgctcaatcgtcttcgcatctgcagattctttgccttttatatatgcaattccttcactggtgtcgactggcttctttgtcagattgctaacaccctgcactgccagaagtatcactgtaatgaccagcgcacatccgaccccgatccgaattcccagtttttgctttctttttattgttttcttcatatatctatattctttctgttttttatatactgtatagaatcccatactgttttaatagtacattttttagcaataaaagtcaacaaatctgcgcttgtatctcgccattccttttagtacaatgataggtagacgattaagaacttaaacagctgcggaggtatctgatttctatgatttcactgactttaacaaatgtaaaaaacttcatgtctcaccttctgttaaaagagacatttgacaatttctcttttattgaaggagagattattacgtttaatacctttcggattgacgggtatatgcagaaagatttctttgattctgaagaagagattccggaatattctctttggaaaaatctgcgtgaattttgtttttccttaattaagggaaagaaaacaccgctcggttttcattttatcttcagcctgaattcaaagaatatttcccgtctgattgaacagaaagaactgggacttaatcctgctgacgtgcagggactctatttgaatatacgttacgatggaactcatctcacctgcgtaaccggaacttccttcaagagttttatgatggataagaccctggaacgcgaatgggatgagatggtaaagaagttctttttaaaaaaagagattgaatttgagttgatgtaaatttaaaaatctattagcgatgtgcgccgcaaggcgcacataataacagccgcctcacggtcaaataatcgtgaagcggctgaacttattaccataaatgatgagaaactcatagaacatgtttctcatcattttactttattattttgtcagaagcatcataatatcattgcttctcttaacgaatgctgtcatctcttccggacttaatggcttatgagcaagcattgcaaggtcatacagctgtttgcagatgattgacacgttctcgctgtctttgttcgttacaaggaactgaacaagtggatggttagcattgagtaccagtgttgcctggcttccgaacatggatgcatccatgccgcccataccatacatcttcatcatctcctgcattcttctgttttcctcagaaagaactgccatagatgctacattctcatctttgagcttttcaactttaacatcaagcttctcattgccaagctctttgcggaagatttcaacaaggctgtctgttgtcttctggaattcttccttctcatcttctgcaacttcatccttcagagaatcatgtacatctgcatcaattctcaagaactgaacttcctgatgtttctgctcaaggtatgtgataaatgcagaatcaatgttatgtgtcagaatgatcgcatcctgtccctgggccttgaacatgttgatgtactggctctgctgcacttcatctgttacatagaagattcttgtcttctcttcttccttcgcatctgcgtccttagactcttctgcgtctgtttttgtttcttctgccttagcttcctctgtcttggctgcatcagcttcttcgcctttggcttctttgatgatatcttcgagagtcatgtatttatgatcaagattcttgtaaagcatagaattcttcatcttctcaccgaatttctcatccttcaggcagccgaacttgatgaatggactgatgtcatcccaatatttctcatagttctcacggtctgtcttgaacattccattcagcttgtcagcaaccttcttggaaatgtaatcagcaactttatttacaaatccgtcgttctgcagtgcactacgtgatacgttcaacggcagatctggacagtcgatcactcccttaagtaccataaggaactctgggattacttctttaatattatctgcgataaatacctggttattgtaaagtttaatctttccttcgatggaatcatactctgtattgatcttcgggaaataaaggattccctttaagttaaacggataatccatgttcaggtggatccagaacagtggctctttgtaatccatgaacaccttgcggtaaaaatcaatatagtcatcctttgtgcactcacttggattctttgtccaaagtgggtgtgtatcactgatagataccggacgtcttacaatcttcgctttctgcttcggctcgccctcttcgccttcctttggttcctctgtaatatgctctactacagtatctgtatcaagaacatctgcctcatcgattgtatcgtactccggctctgcatttgccttggagaggaagatctctaccggcatgaaagaacaatatctctcaagcacttctcttgcacggtactcgtttgcaaattcaagactatcctcattcaggaacagtgtgatctcacttccaactgttgtcttatttccttcctgcatctcatactctgtaccgccctgacttgcccagtgtaccggctttgcgccttctttataagaaagagtatcaatctgaacttcgtctgctaccatgaatgcagaatagaatccaagaccgaagtgtccgatcatctcatcgtctgttgtcttatctttatatttctcaaggaactgtgttgcacctgaaaatgcgatctgagtgatatactcctctacttcttctgctgtcataccaagtccgttatcgataaacttcattgtcttctcttctggattgacaattacttcaatcttcggtttataatcttccgggagttcatattctcccatcatgtccagctttttcaacttagtgatcgcatcacatccgttggatacgagttcacgtacaaagatatcatgatcggaataaacccatttcttgataataggaaaaatgttttcgctgtcaattgataaagtaccttttttaactgccattttactgcactcctttttatttataatctatccgtaactgctcagttacgtttcttttaatatcggctgtcaatcagctttttcgctgatatcgatagtatatttgcttgcctaatggacattctagtacagcaaaatttaaaagtcaatagaaaattagcactcctttcaaaagagtgctaataattccattaaaagtataaagtttttatgaactatactgtttccggctccggataatcctctccgaatgtctcaacagttactttcttcattacctgtttctcaagcggacgatcactgtagtctgttgctgtctcagcaatcttattcactacatccattccttctgtgatcttaccaaatgcagcataagctccgtcaagatgtggtgctttcttatgcataatgaagaactggcttcctgctgaatccggatgcattgcacgtgccatagaaagaactcctgcatcatgtacaaggttgttctctacaccgttctgcgcgaactcacctttgattgagtatcccgggccacccattcctgttccgtccggatctccgccctggatcatgaatccgctgatcacgcggtggaagattactccgtcatagaagcctttttttacaagtgatacaaagttgttcactgtgttcggtgctacttccggatacagttctgctttcatgatatcgccattttccatctcaaatgtaactactggatttgccatgtttaattcctcttttcttctataataatcgttcgcagttttctatacactgtgaatagtcttattgtagcggatttatttcataacttcaaccatcattcttcttcatatggttgaaatgtacactttcccctcctttttttagtcactcgtgacattgttgattttcgtgcctaacgctatactaagtacataagttaaacaaaccaaaatcaactaccaattaaaaaacaaaaccaaatttagtcaaacaagtaaaaaataatcatttaaggaggcacttataatggcaagtttatctcttcagggaattcagaaaatttatcctaacggatttcacgcagtaaaagatttcaatcttgaaatcgctgacaaggagttcatcatcttcgtaggaccatcaggatgtggtaaatctacaacacttcgtatgatcgctggtctggaggatatctctggcggtacacttaagatcgatggaaaagtaatgaacgatgtagagccaaaggatcgtgatattgcaatggtattccagaactacgctctgtatccacatatgacagtatatgataacatggctttcggactgaaacttcgtaaagttccgaaagatgagattgataagaaggttcgtgaggctgccaagattcttgaccttgacaaactgcttgatcgtaaaccgaaggctctttccggtggacagagacagcgtgttgctatgggacgtgctatcgttcgtaatcctaaggtattccttatggatgagccactttccaacctggatgctaaactgagagttcagatgcgtatcgagatttccaagcttcatgagaatctgggtgctacaatcatctacgtaacacatgaccagacagaggctatgacacttggaacaagaatcgttgttatgaaagacggagttgttcagcaggtagatacaccacaggcactttacaatacaccatgcaacctgttcgtagcaggattcatcggatcacctcagatgaacttcatggatgcaaaatgtacaattaagggaaatgatgttactcttacagttggaaaacatgttcttaaggtaccggcttctaagaagcaggcactgattgatggcggatatgacagaaagacagttgttcttggtattcgtccggaagatgtacatgactcacaggcatttatcagtaactctcctgacagcgtaattgagtctacaatcaaagtttacgagctgcttggagcagaagtattcctgtacttcgatgttgagggaactcagttgacagcacgtgttaacccacgtacaacactcagaactggagatcatgcagtatttgcacttgatatggaaaagattcatctctttgacaaagacacagagttgactattacaaactaatcctttacaattaaactaaacacggagggggctgtacttttctcggaaggtgcagcctttcttccatctattattattttatttacggagattactatggctaatacatccgaacttgaaaaaggactcaatgaattaaaacgtttgaccggaatcacacttgcagtgactgccaaagattctgaacaggagcagatggccctggaacagattcgctgtctctgccttgcctaccgggaaaaatataataaaaatgattttcttatgggactaatgaccggcggtgttccttcctacgatgtacagcagcgtgccgcacggctccacattgcaccggaagaaaatcgaattctctttttgattgaaatgaaagaacctgacgagattgttgcagagatccttaaaaatctgtttccttctcagacaaaagcttatatcattcctgtttcaaaagagcgactggctgtattatatccatttcatgagacaaaggattccaaagattctgctgatgaacatgcaagacatctggctcatgcgattgttgacacgctgaatgcggaagctcttgcacatgttcaggtttcttttagtcagatgattccttctcttttggaattatccggggcttttcgtgaagcaagtcttgcactgaaagttggaaaacttttctatccggaacagactgtctttccatacaatgaactggggattggccgcctgatttatcagcttcctgtttcactgtgcgaaagctttctccaggaagttttcttagacaagattccggacaagctggatgatgagacactcctgacgatcaaccgtttccttcagaataatctgaacattgctgagacttcacgccagcttcatatgcaccgtaacacgctgatctatcgtctggagcagattgaaaagcgtaccggacttgacttaaggcaattcgaagatgcaatgacatttaagattgcaacaatggtcatgaactatcttcatgctgaaaaagaaaaaaattgcactgaggtgtaattgatatataatgtgtaactgttcagagccaagcaaaatttcataaaacaggtgtaaaatgcttgcatttttaagactgtttttgaaattttatttggcggatacgccacaccgacgaaatgcgtagcattttggaggttgactctgaacagttactataatatataatatataatatataatatataagaaaggacttataacttatgaatgacgcattatgtgaacatattgtagctagaaaatcaaaaccaatggattttgttatccgtgttcttattattgttgtgatcgttgcaatcgcaatcggaggaatgccatttcttggattctttgcttttgctcttgcagcaatcctggctttacttgcttattattttgcatttccactcttaaatgtggagtatgaatattcccttctgaatcacgatctggatattgatgcaatttacagcaaagagaaaagaaaatccaaaataaacctggatattcagaatgctgagattattgcaccaaaaggatctcatcgactggattcttatcatccggaaacaacttgcgacttttcatccggaaatgcaaatgcaaaggttttcgcaatcatgatcccaatcaatcagaaaatgacttgtgtttatattgaacctgatgaaaagatgattgaacatatgaaacaatggatgggaatgaagatgttcgtagattaatattgaatgtttgtttctaactcagacaagtaccacaatcagtaactactaattgtggtacttgttttttcttttctgtctggttgtagattacgaattgcaattacatacttaaaacatcataatcttatttttcagcaacatctgctatatatttacatgcggcaagtgcagctactgcaccgtccgctgccgctgttgtaagctgacgcacttcttttgtccggcagtctcctgctgcatagattcccgcttctgacgtcttgcaatcttctccggcaacaataaatccactctcatctaactgaacaacatcagcaaatttttcattctgtgcaatctgtccgacagctacgaaaattccggaaacagcaagttctgattcttctcctgttactttattcaaaacccgcagactttccaccatctgctctccacggatttcctgaacagttgtatttaagataaactctacattttctttttcttgcaaacgttttacaatctgatcttctccccggaattcgtctcttctgtgaatcagataaactttgctacagtaatttgacagaaattctgcatcctggagtgctgtacttccacctccgacaactgcaacttctcttccccggaaaaacattccatcacaagtcgcacagtatgaaactcctgcacctgtcagacgttcctctcccggaactccaagatggcggtgtgtcacaccagtggcaagaataatgcttttgcattcatattctttttccgttgttacaatcactttataatccgcttcttcacggatacctgtcacctgctccattatggtctgtgttcccagctttactgcctgatccatcagattcatagagaattcactgccgctcacacttgcaattcccggataattttctacattcggagaaaatgtgatctgaccgccgaaggttgttccctcgaagagtacggtctgctttcctgcacgctggccatagatagccgcagtcatccctgcagttccgccaccgatgattccaatatcataaattcccatatttcccctttcccaacaaactgtttctacattttctgattgttgtaattcattttttcatttacgctaaactgtaatatgtttcaatcacttcttacatatttctggacatatctgcacagactttctctgcctcgatcactgcacttctaaatccaagtttctcaagtacacgtactgcctcaatcgttgttcctgccggtgaacataccatatctttcagttctcccggatgctttcctgtctcgagtaccatctttgcacttccaagtactgcctgtgctgcgaactgatacgcctgtgatctaggcattccctcagctactgctccgtctgccattgcctcgatcatcataaagatatacgccggtgaacttccgctgactgcaacaaccgcatcaatcaaatgctccggcacgatttctactttaccaaaagaactaagaagctccagtgcatagttcttttcttcttctgtcactgcatcattcgggcatgccgctgtcattccctctccaactaatgctggtgtattcggcattgttcttacaatcttaactttctttccaaactgctcttcgagccatgcgagagtcttgcccggtgcgattgtaataatcagctgatcttctcttactgcatctttgatctcagcaattgtctgtgcatagaactgtggttttacagagagaactaatacttctgctttctgtgttacttctatattatctgctgtcacatgaattccatgctcttttttcgcacgttcacgtcctgcttccataatatctgaaccaatgatctcttccggggcaataattccctttttgatgattccgcccatgattgctcctgccatatttcctgttccgataaatcctaatttcatgatcttaagtctccttttcttttaccattactgttctaagaaccgtgtccagtaaccttttatctacatgtatccgtctctcacccagaattttttctcatcctctaatggaatttcttctgtgtccatccagtcgattgtaataaactgattcctgttcagcccttttagcagttcattgatcagccattcccgtccctgaacttccattgtaacggttccatcccattcgttctgaacccagccaaccagatttagtgaattcgccagatatttcgctgtatagcggaatccaacaccctgtacacgaccgtgaaaaacaatgtgctttctaacttctgccatatctgatcactcccttgaagcaatttatgttgtacactaccgttattctaacatatttttttaccttgtacagttcttttcggtaaacagtccctgcttcctgtgttataatgggaataacttttttgaaggagggcttcgagaacgaatgagtaattatgaaacatcacagacttctgatctgaaagaattgataaataaattacgagatacacagactctctctaaaaatgaatggattcggctaattgacggaagaacccctgaacttgccgactatttatttgaaaatgcgcgcaaagtacgaatcactcactatggacataatgtttatgtccgcggactaattgaattcactaactattgtcgtaacgattgttattactgcggtatccgcaaaagtaatctgaatgcacatcgctaccgtcttaccaaagaagagattcttaactgttgcaaaaccggatatgaacttggttttcgcaccttcgttcttcaaggtggtgaagatggctggttcacggttccgcgtctggctgatattgtctctgacatccacaaaaactggccggactgtgcaatcacactctctgttggagaaatggaacatgatgcataccagactttattcgatgccggcgctgaccgctatttacttcgccatgaaacttataatgatgcacattaccgtaagcttcatcctgcttccttaagtgcgcgtcaccgtcaaaactgtctgtgggatttaaaatcgattggctatcagattggaaccggattcatggtcggtgcacctttccagacaactgagaatcttgctgatgatatgcttttcttaaaagaattgaatccgcatatggttgggattggtccatttatccctcaccacgacacacagtttgctgaggaacctgccggaacactggaattgacactttacctgcttggactgatccgtcttatgctgccgaaagtactcctcccggcaacaaccgctctcggtacgatttctcccaccggaagggaacagggaattctcgcaggagctaatgtcgttatgccaaacctttctccaacagatgttcgcaaagattatctgctttatgataacaagatctgcaccggtgatgaatcggcacagtgcaagaactgcctggcccaaagaatggagtctgtcggatatcatgttgttgtagaccggggagattccttgaataagtaaaaaagaggttactgttcactcccgtgtcaatcacttcgctgattgacacggaggatgcatgttttggcttgaatgcatctcgccccatcgccaaaggcgatttaaaatggcgagatgcgttgctgatcgcacattgtgtgaacagtaacaaaaggagtccatggtatgcgacatatcgcatttccatggactccttttctattcacacctcgcctcacagcgcagtgtcattttttcattttctctactagctataagaattactctacaacagctaagatctcgatctcaacgagaacagccttcggaagatccttaactgctacgcatgaacgagctggtttgcttgtgaagtatttctcgtatactccgttgaatgctccgaaatcagcgatatctgcaaggaagcatgttgtctttacgacattgtcaaagcttgatccagcttcttcaagaacagcagcgatgttagcgataacctgctctgtctgtccttcgattgttgtggcatctacatcacctgtagccgggttgatcgggatctggcctgaagcgtataacattccgttaactacctttgcctgagaatatggtccgattgcagctggtgcctttggtgttgaaattgttttcattgaattctacctcctgatttattgaaattataagttcttaatgaaattatataacgttaaaatcgtttagtcaataaaatttcattcacttaactatttttcattgacttctttttcacacaaaccagcatatccatgataaaataaaaccatcaatatactatttgtctgttttgaccgaacaaaactggatatctttcacacagacagaaaggacgcatgattatgccaaccggaaatttaaaattaacttcacttgacaaaaagattctgcactcatactgtcagacactcgatggactttccaattatcttggaaatggatacgagattgtccttcacagtctggaagattatgaacactctgcaatcaaggtcatcaacggatatcacacaggacgtaccgaaggtgcaccgattaccgaccttgcgttgaagatgctcgagcagatccgtcgaaatgaagaaaatgaccatggtgttatttatttttccacaaatgtaaaaggagaaccgctgaagtcaactacaattcctatcaaaggagagaaggacagaattatcggactgctctgtatcaacttttatatgaatacaacaatggcagatttcttctgcaactttgctgttccgattccatctgattctgacggtctcacagtctccggtcagattcatgagacattttcccagagcagttctgatcttcttgagcagaccattcaaaccgttcgtcaagaagtgttgatggattcagcaatatcgagcacaaataagaataaagaaattattttccgactttaccagcagggaatctttaatctaaaggatgccgtcatcacgattgccgaagcgctgggaatcagtaagaataccgtatatctgcatctgcgcaatcttgagaaagtaaataattagcactatctgatatgcaaaacattactgtttacgcagtgaaaaggacaagacactttcattttatctaacatttcattcgaaagtatcctgtccttttttcatcctttattttccagccggcatatatctcagaagttctcctgccacgctggagattggcattgtctgaagccatacatgtccaggtccggtgacaactgtattgaacacaccttcaccgccgaataccatattcttaagtcccggtactgtctgaatctccatgctgcaagttgcatccattgctgcaagatatccggtatccactacaatctgttgtcccggtctcagttcatactctaccacatgtccatcaaattcaagaaatgctattccatttcccgaaagtctctgcatgataaacccttctccgccgaagaatcctgctccgaatttcttttggaagaaaatagaaagatcaacaccttcttctgaagcgagaaatcctgacttctgtacgatcaactcctgtcccggtgcaatctggcgtgctacaatctgtcccggaaaactggatgcaaatgcgatcatcccattacctcccgttgctgtataacggttctggaacagtgcctcgcctgaaaacattcttccaaatgcttttccgattcctccgttggaagttgtctccattttcatattcggagacatccaactcatagaaccgcgttctgtaatcattctttctccattctccaaatagcagaccactaccggaagggtatcacctttgatttcatatctcatggtttattcctcctgaatcattcttcctaacatattctgtaaagttccatctattctaagaatactattcttttacaacattttccagtccctaatcttcttttttctcgctcatctccaatttaggaagtataatctccgccttgaacaggtctgcttctgttgtaatattcaagtttccatgctgcagctgtgcaaagctcttggcaattgccaggccaagtccagatccttcggtatttcttgaagaatctcctcttacaaaacggtccgtgatctcctctgtattgaaattcaattcccctgcggaaacatttttcataaaaatctgcacgtcatccggccgctcattcatttctatataaactctcgtatgcggcattgcgtattttgtaatattaacaatcaagttctcaaaaattcgatatgttttttcactatccaaccagagaactactttgtcctccggaagtttccaacggaattccagatgtgcttctctaatcttttcctcattctcaagctccgcctgacggatcagtcctacgagatccactttcatgtaattcatctggatagtcttacttgctgccttactcatctcaaagagatcctcgatcagggctttcagacgaagagattttctctcaagtacttctgtatattcttttctcttttcttcgtctttttcattctttaaaaggtcaatgtaagtgatgatcgcggtcagcggagtacggagatcatgagagacatttgtcacaagctctgtcttcatacgctcatttttcacttcttcatccaccgccttcttgaatccgctctgaatcttctttaattcatcctgaatcggacggaagattccgacatcaccttcgattggaagatctagctgtccttctgcaagctgatttgttgatttaagcagaagctgatatttcttcttgattccatttagcactttcttcattacaaagaataaaatgatagaataaacaattaatggtatcagtcctatgctgtaagaaaataatttcactactaagagcagaagaaagttcaggattacgattctgaggattcctttatttcctttatcccgcaggtccatctgaagaattgcttcgtattgatgatacaaaaatgctttcatatctttccatgctttcttcaataaatgtctcttttcatgtacttctccacgattttcctttccccaacggatcagcattcctactattgtgtgttctttccagtactctttttcggaagtaaatatgaggcgcagactctctgccacacagaagaaaactcccagcaggcagaaccagatgatccagttgattccaagcatactgatcgtattccacataatatttcctgacgggtgatagttctcaaatgaccaatatactaaatccgcaaatgcctcatagcctatacctattacagaaatccccagaatcactgccaattcaaatggcatgcggaatatttttccttcgtatcttccaacttttggaatacatggaagaagtaatgctgcaagcagagctcctaaaaagaagagtgcagcggaactccagaacatggaataattataatccacatactcgtcttcctcctgatttgcagaaatgaattcatcataatttgcatctgtcatcccataaacgatactgattccgtttgtctgctcttcatcgtcaatctgatcctcaagatctgcatccatacaataataagacagatctttctccacatcgtacgcttcttccggtgacagtttcgtaccgctaactgttacatttgacattgttccggatgtgccatacttatattcgattttgagaacataagaattatctgacttcaaagcctcgtttgtctggtcgtcatttcctgcaagcaagggattcccttctttgtcaaagatctgataatccatatattttttaaaaagagagaatgcactgtctgacattaattccatctgttccgatgcatccatcgcatctgtgacctcgctatagagaaggcgatttcctgtcgcaagggaatagtccattcgctcaatacactcttcaacatcatcttctactgtaaatgttgatgcgatatcttttcttaccacataataactttccacaacacctgctgcgaataagctaagaattactatcgttataattgttcttatcttacggttgcttttcaagtttgtatccaactccccacaccacctttaaatattttggtttcttcggatcgatttcaatcttctcccgaatatttcttacgtgtaccatgatcgtatctgtattaattgccttttcctgccatactctttcgtaaatctcttcggatgaaaagactcttcccggattctttgccaaaagaagcagaatcttgtactcgatcggagttaatttcaccggattgccatccattgtgacttctaccgtatcctcattgatctcaagtcctccgatcacatgtacattctcctgtggtaccagcttctccagaaatctgcggtaacgtctcagctgagaattcacacgggccatcagttccatcggtgtaaacggctttgtcacataatcatccgctccgatgttgagccctgtgatcttatcaacttcctctgattttgctgacaacatgattacaggaaaatcgtatttctcgcgcaacttcatcgtcatacgaattccatccatacgtggcatcatgatatcaatgattgccagatgaatttcttccttctcaaggacttctaatccttcgatgccgtctgctgcctgaaacaccttatatccctgactctgcagataaatctgtacgccttctctaatctctttatcatcctctacaattaatacgtgattgatctccattttgtttcctcctaaaaaaaataacctcctttatatatctacagaatactctgtaaatctaaaggaggcttttatatgtttcaaaagattttcttaagcttactatagcttttttaaaaatattggtctcttagttctctgcgttctgctctctgaagaaaatctgacccgtagaagcgtccattccatctacaatcgccagtgactccaactggaatccaaggttacggatgattcttccgcctgactggaatcctttctcaattgcaattccgataccttctactgtagctcctgaagactgaacgatctgaatcagtccctgcagtgcacatccgttcgcaagaaaatcatcaataataagtacatgatcatcctctgaaaggaacttctgtgaaacgatcacattattcttacacttatgtgtgaaagattcaacctctgctacatacatctcgccgtctaaattgatgctctgagacttctttgcaaatacgaccggtacatcaaagtgttctgctacgatacaggcgattcctataccggaagcttctatagtaagaatcttattgatgttcttgtcagcaaatctcttcttgaattctgcacccatctgattcaaaagtttaatgtccatctgatgattcaggaaactgtcaaccttgagaacattgccctcttttacaataccgtcttttacaattctttcttccaaaaaattcatctttctacctcttcctctgtaatttccccaaaatgtgttactgctcagtgtaaccccaaaaatatttcttaaagtatagcacaactccatataagaaacaacgttaacaggacgaaaaaatagtacaaaaataattgaaaaaaagcactttccttatccggtttatcaaaaccgaatctatggaaaatgcttcgcgctatttctgtacaactttgattctgccctccaaaattagggcaacaaaaaagcgggtgatgggaatcgaacccacgtatccagcttggaaggctggtgttctaccattgaactacacccgcatttcgtgtcttatctctgacacgagtagtatcttatcatactctttttaaatatgcaagtacttttttaattttcttatattttttattttcccatctcctgcagtgcacggataaattccagatcttctgcacgaagcttcagatttgtctcgtaatgagctccgttcggtgctgtcacattgatctcgatgatcgtgccttcctcaactgcattctgagctactgctcctaagaacattggaaacttcggatgatttctgcgaaatgtatccatatgtccttttaattcctgtatctttccaagctgtgaaaaattcatatcaactttcctttctgccctgacgacttttaccttatttttattatgctacctacggattgctccattgctatgcaattcccgcaatcctcgaacacctcaaactcccataaaatggcgtattcacaccattttattccgttttcggtgttcggcgtgtcaataagtataaattgcttatttgtgcaagcacaaacgcaatttatacttttgacacttacatcataatatacgaatctgataaaaaatacaacttttttgacttattttccacttcgttatataataggaaaagtgaccgatgtccccctttttactaaattatttcaaccagcaaggacagacatcccggacttcggttttcagattagagaaaagaggtaacatccatgagcaagagaacagataagaaaagacagaaaagatttaatgaggtacatccgactaccacagcaccagctgctcagcctgtagtagagacagctgcaccaacagctgaacctgttccggaagtgactgtaacagaaacaactgcaccagtaaatgttgctccggcatatgatcttttcatccagtatcagaacggcgaatatgacgctgctgtacttgcagagaagattcttgataaatgcaaagctgaaggtatggacagctccgaccttaagatctatgtaaaacctgaggataagaaagcttactatgcttgtgccggcggaacaggtgctattgagttagcttagactgatagaaagaaagtctgtgaaagaatctatctactcttaagattcttttcacagactttttattttgactgttataccctgatctttttactatactccgacctttttacaaacatctgccaaacagcatctgtcgcaatacggtttcgttcttgcagtacatatctctcttccatgataaacaagacgatggcaaaggtcacttccttcttctggcgggataatcttccacaatgccatctccaccttcttcggctctttgattccatctaccagaccgatccggtttgtcaggcggatacaatgtgtatctgtcacaattgccggctttccaaacacatctcccatgatcagattcgcgctctttcttccgactcccggaagttttaataaagcatcaaaatcatcaggaacctttccaccatattcatcccgaagcatcttcatacaggcactgatatctctcgccttactctttccaagaccacaaggacgtacaatctcttcaatatcttccaccggagtttctgccagtgcttctactgttggatatttctcataaagaccttccacgactacatttactcttgcatctgtacactgtgctgccagccttacactgaccagcagcttccatgcctgatcataatcaagcgtgcatcctgcatccggatactctttcttcagtctttcaatcacttcaagcgcacgctgtttctttgtcatttatttcacctcggcatttttctttaattcttccatcgcattcttgaacttgtctgatactgctgtagggtttcttctcagctgtctcatagcatttacataatttctgtctgtacgtgagcctaatttctgtctctcacttaatatattggaacgcatctgggcaagttcttttctccagtttcctttcgattcagactcttgtgcttcattctccagtcggacagtacgaagcagtgcctcaaccttctctgaaagctgtgtaagctgttcttttcgttctctacgctgttcttctatcttcgcaagatacaattcttttcttgtctgcttctccgctgctttcatctctttacgctcttcatacaacagatagctgtcctcaagcctctcctgtaccccttcagatgcacgtttcagccgttcctgaacaccttctgatgcatctttcagtctgtcctgcatttcctcagaagcatctttcaggcgctcctgcatcttctggatctgttctttgctggcttcaagctgtacaaggatacgtttcatatccatagcctcgttgaaggactgtgtgaagtcaactgctgctgcgattgtcagaacaaatgcaaggatatcggctattgtaaccggaatcaacaataccatatgttcaaatggaatatgtacgacctttaccataagaatggagaatactccccagcacaagcttgccagtggacaaatgtatcctctgacattaaatttcaggtttctataatcccagtaccttacgtggaacaaacgctccatcgtaattcctgtaaaatactccaggattgtcgcaccgatcattcccataagaaaaacaagcaggatgttatctctgaccggaatcgtcacgatcagaacaaccattgctccggaaccatagagcggaagcatcggaccatgcataaatccacggttcacccaacggtgctttctgacagaaacataacagctttcccagatccatcccagaaaactgtagagaaaaaagaataaaacccattgtgataaatcgtattcctgcatttttcttccccttttttaaaagacttccgcgctctgataaaatgtaacgcagaagtctctttcttgaaatcttttagtttctctcctcgatctccatcagcagatctactctgcgctgatgacggccgccttcgaattctgtattgatccatgtatcaacgatcatctttgcaagttctccacctactacacgagctccaaatgcaagtacattacagtcattatgtgctcttgacatcttcgctgtaaatggctcgctgcagacacatgcacggattccttttactttattcgctgcgagagagattccaagtcctgttccgcagatcaaaatccccttctctacttctcctgctacgactgcacgggccactttctctccatacaccggatagtcacagctgtctgttgtatatgttccataatctacaacctcatgacctttctctttcagaaattctatgatttctgctttcagctccagtgcggagtgatcgttaccaataccaattttcattttaacgttccatcctttctaaatttcaaatatcaagaatgcctcagcattcttgctgcgaggtgcgcgtcatgcgaatgcaggacatatttctcctgcgcacctctgcaatcctgccagaggctatgtcagatgggagtttatctcacatctgatataccgtttctatcataccaaacttgtacggtcttgtaaactcacaccggatttgtttctaatgtaatacaaaatgttgctgttcaggattccagctttgcctgacaacaaaaagagaagctgttttcagcttctcttttccttctgtaaaccgtcactatgataactttcttctgttacgcatgtaatccgtttactttatatcttagaataatgaattgaaacgctccattgcttcttttgtcttctcatgttttccaaaggatgtcagacggaaataattctttccattttctccaaatcctgctcccggtgttccgacaacctgagcattttcaaggagataatcaaagaactcccaggactccattcccttcgggcactcgaaccagatgtatggtgagttcacgccgcctgtaaatgagattcctttcttctcaagtgtttcggcgatcatacgcgcattttcacgataatatccgatattctcctgacactctttcatgccctcttctgtgaataccttagctccggcatactggatgatatacggtgttccgttgaactttgtacactgtcttctgttccacatattgtgcagactcaatgttccgccatttgatgtctcaaacacaagttcttccggaacaaccgtataggagaaacgtgtacctgtgaatcctgctgtcttagaaagggaacagaactcgatcgcacatttctttgcgccctcgatcgcatagatgcttcttggaagtgtaggatctgtgataaatgcttcgtatgcggaatcatacaggatcaccgcatcatttttcagtgcataggcaacccatgcctctaactgctctttattatagcatgctcctgtcgggttgttcggagaacacaggtaaatgatatctgcctttacattttcatccggcattggaaggaaatcgttttcttttgttccgttcatatagataatattctttccatccattgtatttgtatctacataaacagggtaaaccggatccggaacgagaaccacgttatcctttgcaaaaagctctgtaatatttcctgtatcactctttgcaccatctgaaataaagatatctgtagcttttacttctacgccattgcgtgcgtaataatctgcgattgcttcctgtgcaaatgcatatccctgctccggtccgtatcctttgaatgtctcagatactgcctgagaatctactgcttcatgaagtgcctcgatcacactctttgtcaatggcaatgttacatcaccgattccgagacggataatatccgccgctttctccggatgtgtttcctcatatacttttactcttcttgcgatctctgcaaaaagataactgtcttttacattctgataattttcatttaactttggcatctttgtcaaactcctttcccagctgctttcatgctgttcacagtattctgcaatcaataactctagtattcctatgtgttatattaacagattttttttcattcgaaaagaagttgaaaaaaagaaacaagattttgtaaaatcttgtttctttgataataatttcagcactttaactgtgcaaattgatgatgcgataaagaatatttttctttttttctttcttacaaaagccagataatcagcaaaattgcctccacaacaaagatcacaggcactgtaatcataaattttgctttccgtatcttatgccggaagcacatcatacctgcgattgctcctgcacttccaccgatcagtgcaaggattagcagcgttttctccggaacccgccatgcgcctttcttcgctttccatttatcaattccataggtacaaaatgcaaataaattgataaatatcagataataacagaaatatttcataagatgatctcctccttcaaggcaaaggaatagatgatcttctccttcaccggcttctctaacagttgctccaatgcctgggcatagtaatcaagctgtgcatggtacagttctttcaattgagatgcatttctgactctatccgtcttatagtccagtagtacaagcccgttttcctcctcgaaccagacatcaataattccctggatgagaatggtctcttcctttcgattttcatccgcttcctgacttctcttctgaatgtcctgatagatcttcggatagatttctgatgcagctactccgagaacaaatggctgttccttccgaagctttccatttcctgctgcttgtgtcattcgtcttccactctcgctatttaaaaacgcaagaatatctttcgtgcggatacagtctgccatctcttttgacagtctccctgcctgatagaacagttcgatttcttctttcagaagttcctctgtatactcttttgaaaaatcatgaagctcgagaaatttatgataagcacttccccttgaagctcctgtcagtccttctttctgttcttccatgaaatgcggaagcagtggcacaatctccggctcctgaatcaattcttctcctgattcttcctgcaaagactcacgcttcttcaactctgaaactgtaaatttcagcttcatttttccttcttctttatatggatacaggaaattcatctgctgttccagcttttcttccgctcccggaagataaaccttcgttgtatcccagtgttcaagcacttctcttgcgattacttctgcctgtcgctgtgcatcttctgtaaaatccatctcttctgcatcaaaaatccggactttaatcggcaattgctgcacctcttcactttctgttttgagaattccacacaaaccatcttctctcttgagatcttcttcctgaagaagtgccggaagaatccagtccagataacggtttgcgccttctaactgataaaggctcaatgaagattccctgtctgtcatatgattcacataaggctccagaccgtcttctcccattttcagacttcctgtcagaatcagcttttcctttgctcttgtcatcgctacataaagcacacggagttcttctgcaagattctcaagctttgtcttctcctggatcattttcttcaaaaaagtcggtgcctttgtcctcatctcaagatctacaacgtcaattccaactccgtttctcggatggatcacaatacttcctttcagatcctgtgtattgaattgcttgcctgttccggctacaaaaacgattggaaactccagacctttacttttatgaatactcataatacggactgtgtcatcctgttcgtctatgatacttgcttcgccataatcaacatcatattttttcagttgctcaatatagcgtacgaaattaaacagacctttataactcgtcccttcaaatgctcttgctttctcaacaagcatttctacattagcctgtctctgtgcgccccctggcatcgcactgataaataacccatagccggttttatcaattatttccacaagaaggtcatggattgccgtatacggaagaatttccctaaaatgatccaatacctcgaaaaacttcctcaatttttcctgtacctgtattgcctgctttttgtccacagtttccggaatttcttccgaactcaggctgcaaaatccttccactgcctcgtaaaacaactgattcggatacgcaagacgaatcactgacaactctgctgccgtcagaccggcaaacggtgaagtcaaaactgctgtcaatggcagatcctgtcttgcattatcaagaactttcagataatccagaagaacactgacctcatacgtctcgaaatatccttctctgctcacagagtatgccggaattccctcctcagccaatatggacgcaaaaacttctgcccacccctgtaaacttctcgtcagaatcaccatatcccgataatgaaccgggcggtattctcctgtctccttatcaagcacaacacccgtgtttagaagttctttcattctctgtgcgatcatccgcgcctcttcttctctcgcttcactgctccgaagtcccgtctgattataaagaagcagttccgtctgatccgtaaacacattttcatccggtaattcaggaaaagaggctcccaaatgcagtgccgccttatcgtcatagataatttctccgaattccttccgcatcagtttcctgaaaatataatttgtactgtcaagtacttctcctctgcttcggaagttcctgtcaagatcaattctctgcctgctgctctcctgcgtactgtagctgttatattttcccataaagagttccgggcgcgacaagcggaatcggtaaatactctgttttacatctccaaccataaaaagattattctgtcctgccgactctcttgacacactcgtcagaattgtttcctgcaccaggttactatcctgatactcatcgatcataacttcttcaaagcgttcctgatactcctgtgccactgctgacggaaccagttttccttccttttcttccgtcagaatccgaagtgcaaactgttccatatcactgaagtccaacagatttctctgtctctttttctccgaaaatgcctctgcaaaagcctgtaccagcagaactaacatcttcattgctgtctgtgcctcttgcatatccctgatccactcatcaacaggcgcgtagaaatagtttgctttcagatcttctatcagtttcttggcctgttttctaagcccctgcgctttctctttcagctccggatcgactgtcggatctttctttcctgacaaacgtttccatgtaaaatcactgatgatctgctcttgctgacaaaatgtctctgctccttccaattgctcaatctgtaccagatcagaatctaacatttcaccatacatatacggaccggccggaagttcgcatacttctatcgcctgttgaacaaaccctttcacatctgtaagattcttccttactcttgcctttgcttcctgcacgacatctgcttcttccatcttctccggatcgatctcataattatccacacattccttcaaccacttttccggctgtggataacttctggaatattcataaagctggaggataagttcctcgatcttctgatcatttcttcctgttccatactggtcaacaaagtttaaaaatgcctcggatccctctgcatagaaattctcgatcagctcttctaagacatcctgcatcagaagacgcaattctccttcttctgcaatgcgaaaggccggatcaattccaatcacatgaaaatgatcccggatcaccgacaggcagaaactgtggattgtcatgatcgacgcattgtggatcaatgtggactgctgctccagattcacatttcccggctgttcttccagcttcttttcaattgctgcaccgattcgttctttcatctctgccgccgctgcttccgtataagtcacaaccaggagacggtctacatccgcgggatcattttcatctgttatcctggaaataatccgttcaacaagtaccgctgtctttccggaacctgctgctgcagatacgagaatgttgcggtcacgcaagtcgattactttctgttgttcttctgtccattttatgctcattctcctgcctcccctttctcttccaaaatgccaagacgctctttcatagaattcaacgcttcttccaaggtatattttcttaatcttctgtactcacagccttcaatcctctggtcaaatccgcagatatccctgcacccacagtaatcacagcctgtcatctcatcaagtacatacggaagtgccgcaacctctccctgatacatcacgtccttcagctctttttctttctctttcgtgtacgcaagaaccgtatcaaagttctcctttgataaagcttttgatgccgaaccgagcgttctgttcttattcatccgcagcggatagaatgttgaagttccactcagattccgttccagatgctcaactacattttcatctgcattgatcagtccatccagcttcagctcttttagaatactttgctcaacttccgcttttgtctcttctttcttcacaatcggatcctggatcctgtaataaaaaataccggccggaagtacttctttctccggatgtttctgccgttcgatctccagtgccgcattcagataaaccggaagctgcatctgcaaaccgtgatagaatgctgtgatatcaaatgctttccttccagttttataatctgttaccttcacatagactgcattttcatcttcacatgtatcaattctgtcaatctttccgctcccgaacttaaattcacacccgctcggcacaaaatcgcctgccgccatctgctgtgtcagtgcccagacggaccggttgatcaattgcttgattctgtggatcatatactcattacgtgcagatgaaaatagaactgtatttccataatccagaatactttcttctacactttcatcaatcagccgctcccgcttctcttccggcattgtaacccagtccagaccttcctcttctaccttgtgtgcaaatcgctccagtgcctgatgtgcaatatttcccagatccattgcttcgaacccatatttctcccgttctgacagacggagtccgtaattcaggaaatgtgcatatgcacaggaagcaaaacgttccagtcttgttacgctgacacgctttggatccaggaagagttcttttgctactctacttccaaggctcggctcatccttccggtagaaaccggcttctatcatctgcttcagaatttcctgactctgttcatcctttacaaaccatctgtacagttctttccaggaatcatccagtccatgctccctctctcttaaaccttctgcaatctgcaagagtccgctctttctcatcatctcatgatcaagcagcccctttctgtcttcctctaccggaacaagtaccgggaacagacgcatcagatcctggatcagatacgctggacgaagtgcttttccttccccggatacttttgcccaggacagatacagaagttctgacggtttcgtcagattcatatagagataaaatttctgaatatataatttctcttttggtccgggagaaagattcattttcttctcctgaaactgttttctgtctcgctcggaaagcagacctcttgcccctgcatttcctggaagaagcgtatcatttgctccgacaaaaaataatgcgcggatatttttgatacgtgttctctccatatctccgatcacaacctgatccagacttggagggatcacacctactttcgcctcttcaagtcctgcatctaaaagttcacagtattccttcaaaggaatctcttcctcccccagaagttcaacgaatttatcaaataattccagaacaatacgataaatctgtgcatattccttcgccagtgccagttctccatcttcctggaatttctgctccaattctgcaagctgctcctggatcttctcctgaaccagatattcataaactgcaagtgtgatatcttttaccgtcttttttctcttcttcagaactgtatgcagcggtgtcagtttttccacaaaacgcatgcgcagatggttcagttcttccagttcttcctttgtcgtcatcggtgtctttctcacccagacctgatcccatttcttgaatcctttcagatccagcgcaagacagtaattttccagacggtctacttcatctcttgtaaacccacacaggctggtccgcagataacgaaaaacgctttcgtaagtatagttctgttctaccatcaccagcaagcttcttaaatactctacaaaagaatttaataaaatacttttcttatgatccataaagaccgggatttcatatcgatcacatgctttttccaaagcatctgcataagtactcagatccgaagcaatcactgcgatttcccgatatctgtacccttcttctctcaccagacgccggatctcctctgccacatactgtgcctcttcctgtggtgtatgaacttcatgaagagaaattgaccgcatcttctctccactgtattttcttctggaataacgaaatagttcctcttccaaaaacgccatctccggattctctttgaaccgatacgacggattcttgcataaccagaccggctcatcaatctccactctcacttcctgcgccacttccgtcagtgaagtaaccatctgcttactcaacgcaaagagctgatacggatgcttatagacaaacggatcttccctccgatcgatctcaactgtcaacataatcttgtcgcacactttcagaagttccccgatcagccggttctgcaccggtgtaaatccggtaaattcatccattgcgatcacactgtctttaagcattttcgcttccggtacagtctgactcaacacatcaagtaattcttcttttgtgatatatttatcacgcagataatcctcaaatccttcatatactttacggatatcctttaacttataatacagataactttccggattcagtccttccatgaaagaatcaagctgttcaaaatcaattccatactgtgtgaattctgatatcacagacttcacttcgctgatatatccctgcttcttaagatttcccttaagaacggtcagctcatcttcgtaatttcctgcaatcttacgaagcaccagattcttaccctcatcatcaaggatcgactgtctttcttttcctgtctcttcaaaaacacggtgagccagacgtccaaaacttaagacatcaatattcataataccgccacgcggatgtgccatacacaggtccttctgcgtctgcattgtaaactgctccggaaccagaacaagataattcttctccggatgacggattgactcctcaacaatctgctgatataaataatgggactttccgcttccggaattcccgaaaataaactgcaatgacatgctctgactcccgcctttcttcttaatatctaagcaaaagacaggctgtcgttcacaggaatgagccatatctctcagccttctctgtgcccggcagcccgtctgggtttttcctttcttttattatcgcaaatttatttcacaaggtcaaccagtgctgtcttaggaatcgcaccaatctgtcttccgctctcttcaccacctttaaatgcgatgaaagtcggaatactcatcactctgtatttctgtgcaatgtcgatattctcatcaatgttgatgtggcatacctttacatcactgagttcttctgaaagagcttctacgattggagccatcatcttacatggtccacaccagtctgcataaaaatcaacgagtaccggctgctgtgcctgaagtacttcctgctcaaaattgtctgttgtaagttttactactgccatctttatatcctccttatagatgttatatcttttatctgtaactaaacagttacctttttcctttgttacaaccctagtatagcacatattttttatttttctgtgataaaatcacaaagaaaccgacagtttggatttttcctccctgccggtttccttcattacttcattacttcttatattgttttatcttattgaaccaagtctgcgaccctttatttacgcttcatcgattgccttaccgatatcacgtctcatgtatttattcttaaagtttacccattctgttgctgcatatgcattcgcacgggcttctttcagatcttttcccttcgctgtcacgccaagaacacgtccgccatttgtcacgacctgatctccgttgaattttgttcctgcatggaagcagtaatatccttcgtgcttcttgaactcttccagtcctgtgattgggaagcctttctcgtagcttaccggatatccttcggatgcgagtacgacacagactgctgcattgtcttcaaactgaagatcaacctgatccagtgttccgtcgatacatgcttccataacttcaaggatatcattcttcatacgaggaagtacaacctgagcttccggatctccgaaacgagcgttgtattcaagaaccttcggtccgtcttctgtcagcatcaatccaaagaagataactcccttgaacggacgtccttctgctgccattgcatctaccgttgcctgataaacatatttctcacagaattcttctacttcttttgtatagaacgggcttggagaaaatgttcccataccacctgtattaagtcctgtatctccgtctccggcacgcttatgatcctgcgcacttgtcattgtcttgattgtctttccatcaacaaaagaaagtacggaaacctcgcggcctgtcataaattcctcaatgaccatctcatttccggctgtaccaaacttcttatccagcatgatctctttcacgcctgcttttgcttcttccagatccttacagatcagaacaccttttccgagtgcaagtccatctgctttcaaaacaatcgggaacttcgctgtctcaagataagcaactgctgcttttggatctgtaaagttctcataagctgctgttggaatattatatttcttcatcaggtctttggaaaatgctttagatccctcaagaatcgctgcattcttcttcggtccaaatgtgcggattcctgcttcttcaagaacatctacaagaccgcctaccagcggatcatccattcctacgatacaaagatcaatcgcattctcttttgcgaaatctcttaatttatcaaattccatagcgccgattggtacacactgcgcatactcagcgattccggcatttcccggagcacaaaagattttgtctgctcttgggctctttgccacgcttgctgcgattgcatgctctcttccgccgcttcctacgatcaatacgttcatagtctctgcctccttactcggtaacgattgtacgatgtccttctacttcaacctttccgttcgcgatcaaatcgattgcatgtggaaggatcttccattcagcctgttccatcactctgcgctgaagcacttccggggtatctccattgtgtacttctacagccttctgcaagatgatcgggcctgtatcagttccttcatctacgaaatgtactgttgcaccaactactttcacaccgcgctccaaagctgcctcgtgcactttcaatccataataacctgttccacagaaagatgggatcagagatggatgaatgttgatgatccggttcttatacttcttgatcatctccggcgggattaccacaaggtaacctgccagcacgatcagatccggctcatatgcatctacagcctttaaaagttcttgattgaacacttctcttgactcgtagtccttcggagaaatgcatttcgcatcgattccattttctttggcacgtgtcagtgcataggcattcttattattgctgatcacgcccacaagttctgtgttcgtgatcattccattctttacgctgtcgatgattgcctgaaggtttgttccgcctcctgacaccatacttaagactcttaacataaagtcactcccttttcgccagtctcaatcttgccgactacatatggctgatctcctgcttcacgaattgcatccattgtcttatcaacgtctgccggatcaacagcgagaaccattccaagtcccatgttgaatgtgttgtacatcatctgctcttcgatttcgccctcttttgcaagttttgcaaagattggtggaatcgggtagctgtctttttctacaaccgcatgggttccttctttgagcatacgcggaatgttctcatagaatccgccacctgtgatatggctgcatgcttttaccgtaacacctgcatttttgatgcttttaagtgcttttacatagattcttgtcggagcaagaagtgcctctccaagagtagttccaagctcatcataataagtatctaaagattcttttgtaatatcaaatacttttcttacaagtgaaaatccgttgctgtgaacacctgtagaagccattccgatcagaacatctccggctgcaagattctctcctgtgatcatatctttcttatcgcaaacaccaactgcgaatcccgcaagatcatattcatcttccggcataagtcccggatgctctgctgtctctccaccgatcagagctgcatcggactgcttacatccttctgcaacaccttttacgattgcagcgatcttctccggataattctttccacatgcaatataatccaggaagaagagtggctctccacctgcacatgcaatatcattcacacacatagcaacagcatcgattccgattgtgtcatgtttgtccattaccatagcaagttttacctttgttccgcatccgtctgtaccggaaagaagaacaggctcttccatctctttgatcttcgcaagagagaaagctcctgagaatccgccaagtcctccgagaacttctgcgcgcattgtctcttttacatattctttcattaattccactgatttgtaaccggcctcaatatctacacctgatgtcttgtaatccatcgtaaatctccttttctttcgaatcgtatttatttattgttgagatattcctcataaccaacttctgcaagtctgtctgcttttgcctgtaccgtatctttcatctctgcagaataagctttcagtttctctaaaagctccggatctgacattgcaagcatctttgctgcaagaattgccgcattcataccgccgtcgattgcaactgtagcaaccgggattccaggtggcatctgaacgattgaataaagtgcgtccataccctccagattctttcctgacattgggataccaattaccggcattgggaaaagtgctgcgcacattcccggcagatgtgctgccatacctgctcctgcaataattactttgattccctttccttcagctgcctttgcccagtcaaaaaagacatccggcatacggtgtgctgaaatgatcgtcatctcataatcgattccaaatttctccagtgtggctgctgccttactcatcaccttcagatctgagtcgctgcccatgacaattcctacttttggcatatcatttcctcctcagtggtatactgttttccttcccttggaaaactttgtttatttattatccatacttatgaaagattccatttaatcatctattaactatccaattacctataggatttccttaaaatcccgcttcatccaaaggctcattaagtacctctgttcccggcaatacgaatcttccgtcctctaatagtataatgtcttttccctcgtttgtcactacacttatttcttctaactctttataaggcacggttatatctgtatgacagttaaagtatgcttttgatacatcttccttacgaagaagagaacaggaattatctttcgccacaatttcctttccattcggattgtagactctgatttcctcgctccaggaataacatgtatctcctactgcaaaatgcggtcctgtcttctctgcgatcagaatcggcatcttatcttctatattaaatttctttgctgccacatatgcagtcgtatttgttccaattgcgaactcaccaagcggaagagtctcatgattcttcaacacattatcgtaaatgtatttcttattctgtgcttcatcctcaaagttcgtacatgtatagtcggtgatctttccatcctgaaatgtcagcttcagattctcatactgaagtccgtccagatataccttgcttacatgaagtatgccgttcgtcccttccagaaccggtgatgtaaatacttctccgacaggaatattcacatctgccacacaattttcgaagattgtctccttctgtgcgtctttcagatgatataactgtactgtaatatctgtctggttttctccttttcctcttacatgtacacaagttccctgatctaacgcatcgatcattgtctgctgcactttttcataaagcttcgcgtctaatgtattgatcttgatcacttcatcaaagatctttgcataatctgccccaatctccggcaccggataagcaacaatcgtgaaacttctttcctcacccttgatatactcattcgtgatctgtcctgatctgctgctaaagagaagatccagttctctctgcgcctcatcatatgccggtgctgtttctttcgcttccggtgaaaatggagtctcaccgaatatctccattactgccggtcctgcaactcctgctgccatctctttattttgctcaaaaacggtcttcatcacctcaagcttacgttcaatataacgcttgtccataaagagtgcctgatcctgtctgtggtcatactcatactgctgatttgcgattgcaccgtaatatccaatcttgtggtgctctctctttgtgatcacgctggaagctgcgcgataaataaccggctttaatcccatcttacggaagttttcgattgcaagacggatcaccttctcaaatccaagactgtaacggatatttacaatcgatttctttgacagatcttttccagtattaataaaaccaacccgatatccttccgtatatacatctgccatcttctgcagtgtctcctgtggcagatttctcagatgatgagctgttccaagttcattcttggaaatgtactcaccgaattcatacagataatcatcttcatcaagatctgccttttcaatgatctgtactgcaaaatccgctgacggatccatctgctccagaattcgatctgcatagaacacatcacagtaatcgcttgcataccaatacagaatctccttgatctgctccggctttggaactggattctcttcctcactcattccctcgaaacaggtatagacttcgagaaacaactcatagaggattgtcagataatccttgcgctgttcaaacacatacggaattcctgctctgatttccgtatacaacaaacttaaaagctttcccatctcctgccccaatttttcacaggcatagtcttgattggcatagcttgtctgatatttctctcctataatatcactataaagaatcctgttcaggctacgcttttcttcaagacttaagctgtcccagcttccatcttctagcttttttcgtgtattctctaactcaagcagaaacaaggtacaatcctgaaagtaagaaatataggctgtattcactgtttcttctgtcacgatcgtgcgcagacgctcaactgccagttcgtgacgctgtgtgcactgttcatttttctccttctgtaactcacttaactttccgatcataagctcagacctccaacaaaaattccaaggaagcacaagatctgcacaataccgatcccgattccacatttgcaggaaagatattttctatcctgctcctcaaatccttctattgcattccagattccatatatatcaatcattaaagaaaggattgcaatccctccaacaattccggctgcctttcctctcgtcaggaatgcatatccgacacatcccagcaagatagcaagtgaccatccggtcaaccagcaggagatcacacctcttcttgactgcagatacgctgctttcccatatttctttgatttattactctttcgttccttttctttcttctgatttttttctctttcatcgtttttcttttctttttttccgatcatttcttctccttagtagattacaaactacaaaaactatatatccaagtacaccgccgattgtattcagcagaatatcatccacatcaaagcatcccactttcgtgatcagctgcattaactctacacaaagagtcagacaaaaactccaaaataacgttttaaaaaagcttcttctttttcctgccattgcagaaaagtaaccaactggcatgaaaatcagaatatttccaaataaatttgagaacaccgcaaatgttcccagctgatgtctgtattgaataaatctcttaatctctttgaatagcaccaaattgtaatggtattcatccattacgccttccctgccgtaccagtctgataagaacagaaagtatacaaggaagataatatataatataaacaggatctttccaagcgtcctgactctcttcgcttctttttttgtcaatttcttacaccttcacagaaaaagaaagtcccctctgccggttcacttcggacgtaactactcacaatgaacaagctacgaggggactttccttttaaaatgttatattatttttatgttttaatagactggctccattgataatagaaataattcctaccgtaactcctgtaacaagcaggataattccaattgcaatgttacctgctccgctgtttctcattacacgatacgctttttccaaaacatcaggcctccttattttgctccatatttctcataatatgcatcgatcgctgcttttaattcatcatcgatcactacttttccgtcacattccttgttgtaaaggcactctacaacatcttccattgtaacgatcgctgctgtctcaaatccatagagatccttcacttcgtcaagtgcgcacttctctccgccttttcctacttccatacggtttaaggataccataagtccaacgattgtaacgtcagccgcaccttttaccttcggaactgtctcttccatagatttaccggatgttgtaacatcctcgatcatgatcacacgatctccgtctttcagcttgcttccaaggaaacttcccttatctgcgccatgatctttctcttccttacggtctgagcagtaacgtacttcttttccgtataattcactgtatgcgattgctgttacaactccgagcgggattcctttgtacgccggtccaaacagtacatcgaagtcatctccatatgtctcgtgaattgctcttgcgtaatactctccaagtttctttaactgggatcctgttacatatgctcctgcattcatgaaaaatggggattttcttccgcttttcagtgtgaaatctccaaatttcagtgcggcacagtctaccataaattcgataaattctttcttataactttccattctatcttacctccgggtttattttacaataccaaccatatcttttacattctcaaagccattcttcttcatataagcttcgattccgtcgatcacttccagtgtcactgctggattgtggaagtttgctgttcctacagacactgcacttgcacctgcaagaaggaattcgattgcatcttctgcacaggaaattccacccattccgatgattggaatgttaacagcctgtgccacctgataaaccatgcgaactgcaactggtttcacgatcggtccggatactcctccggtcttattcgctaccgcaaatgtctttctgttgatatcaatcttcattcctgtcagtgtattgattagagacaccgcatctgctccaccggcttctgctgcccttgcaatctctgtgatatctgttacattcggtgtcagtttcataatgatcggctgctttgcgatcttcttaatctgcgctgtcagcttttccacattatgtgcatcctgtccaaatgcaaggaatcctgcattgacgttcggacaggaaatattgatctccatcatatcaatcggttcgtctgcaagacgctctacaactgcaagatactcttccggagcgtgtccgcatacatttacgatgatctttgtatcaaaattcttcagatatggaatatctctctcgcagaacagatcgattccaggattctgaagtccgatagcgttcatcataccgccataaacttcagctacacgcggggtcgggtttcctgcccacggtacatttgctacaccttttgttgtcactgctccaagacggttcaggtctacaaattctgaaaattcttctcctgagccaaatgttcctgatgcaactgttaccggatttttccattctactccggcaatatttacgctcatgttcattagatttccacctccgtagacaagaatacaggaccatccttacagatacgcttgttatttacattgctgtgcgcgtctttctctttggacttgcatacacatgccagacaggcaccgattccgcatgccattctctcttccagtgagatataacactcgattccattctcttctgcgtactgtttgatcgcacggagcatcggagtcggtccacaggcatagatcatatctgcttccagagcattttcacggattgcgtccataacatttccctttgttccgacacttccatcttctgtggaaatataaagttctccgttctgctcgaactcttccttaaggaatgtctgtgcgtcgcggtatcctactacgatctgtttcttctcgcagtccatctgtttcgccagttcaaggatcggcggtacaccgattcctccgcccatcagaaatactttctttccttcagccttcttgtatgggaatccatttccaagaggtccgatcaccggaatgatatctcctgctttcagcttagaaaattcttctgttcctgtctttggtcctgtcacacggtaaacaacacggagtcttccgttctctttatcaatctcacagatactgattggacgcggaagtaatttacttccatctgttgtatacatagaaataaactgtcccggctttgcgtcctttgctgcctctgtattgatccacatgctgtagattccatccgccaactgttcctgggaatgtactactgcattttctttctgctttgccataaacttatgcaattcctttcttgaaattattttgctgctgcaagtgctccgctgatatcagctaccattgcttcaactgctgctcttgatgcatcaccgaaattctccggtccgaacttcgcataagcttcctgcttgtaagctgcaataattccacgggaagagtttacgatcgcaccaagtccgtcttcgttaaagaaatgaacaaggtcttttccctgtccgccctgtgcaccgtatcctggtacaaggatgtaagacttcggcatgatctttcttaatactttacccatctccggataagtagctcctacaaccgctccgatgtagctgtactcatctcccatgcagtcagctccccactcggcaaccttctcaccaacccactcataaagcggtcttccatcaataattctgtcctggaactctccactggacggattggatgtcttaacaaggatgaacagacctttcttctcttccttgcatacgtcaacaaatggattcactccgtcagatccaaggtacggattcactgttgcaaagtcctctccgaatggtgtatattccttgcttccaaccttaatctttccaagatgtgctgttgcataagcagcagatgtagaaccgatatctccacgctttacatctccgatgatcacaaggtctttagacttacagtaatctactgtcttcttaaatgccatcagtccaggaattccgaactgctcgtacattgcgatctgtggttttactgccggaatcagatcataagtcttgtcaacaatctccttattgaactgccatactgcctctgctgctccttccagagtctcaccatactctgcataagccttatcaagtacgtgctgtgggatgtaattcagcattggatcgagtccaactacgatcggtgcacctgtctttttgatcttctctaccagtttattaatcattcttcattcctccatatcctgttacttttcatcggatcaccgatgaatgataaccttcggtctttccttcaggttgacgcgttacttttctttacgcacaatatatcatttttcataataccatattcttgagaattttcctagtcatgctttttaataaatcaaaaaatgaagttctttctctgtcactcatttaaacagaatctgaaagaacttcgtttctctgattttattttttaatatcccgccggcacaagcaatgtaaatggataaatcggaatatttctcacgattccgaaccccaccactataactaataccacatataggactttctgattaatcttctgatccacatgattaccaccggtcaaaacccagtcaatcaatcgtgctacaatatacacaccaagaaacgggagtaatgtcacatacatcggattataccggaatgccatataaaatcttccatgtaaaatagaataacttgcccgcccggcaccgcaccccggacaatacagtccggtaataatatgaaagaggcagggcagcggatactggtgcggattatgaaaaaagagataacccgcagcggccactgcaatcactgcccccatcagaactgcgatgatcctggctgacctttttgtttgaaatgcttcacgcatctttatcttccaaatcatcctccgctcactttttaataatagtaataagccgaaccggaaactgcccctgtcacgatcagaaccatgtagatcaaccatgtaagaagaccaattgcaaaggatacgataatccagattcttgccatcttcgcattattctgtgcttcttcaagatttcctgccagcatagcactattgatcttcgccgagaatacgattcccactacaccaaacggaagacagcaacataatgttgaaataattgataatataagatatggaacccagttcactggctcctgtggcattccattgaaattattctgctgataatatccctggttctgctgaccatagtttggagcttgctgagtataattctgattttgctgaccgtacccctgtccatactcatagttgtttggttcaccataggaagtattctgctcctgattcacacttttgtatggatcgttctgatatgaaccttccacatcctctggctgtgttggttctgtcggctgcacatcttcttctggctgcactttttcttccggcagcacatcttcttctgactgcactttttctgtcggctgctgtacctctgctgtatcttctgttatgttatctgttgcctcttccttcacctgtgatacaggttccatcttctgtaccggctgcttcgccccgcaattcgggcaaaacttacagctatccggtatctcctgataacagttcatacatctcatcatctctacctcgctttcgtaagtcacaattctcactttcccagagcactgaccaatttgctcacttgttcgttttgcgactttatttcttatatcataacattaatatcaccaaaaaacttgtatcttcattaaaaattaacacttttcttttcccaaacggatttcttccatctgttttgcagtttcctcatcaagataatccaaaagataatttttcagatttacctgcctgcccagatgctctcctctgagttcttttaatgccaactcaacctcttctttcagacctggcgcagacattctgtgagccccctgccccatgatgatcacctgctcaagtccatctgatgtggctactgttacatctgcattcttcgcaatcctgcggactgtcttctcaatatattgatctgctgtttctgcttctttcgtatagacgatataaatgttatgatatttcatcacttcacccggattcccctctactttataagcatcatacacaaggatcagggtacatttgcggaatccctgatagttacttagaatatctgcaagctttcctcttgctgcaccaatatctctttctgaaagttctttcagttcctcccatgaaaaaattatattataaccatctaccagaaggtattcttctgttccggctttcgctctccggcgtgcttcccacttcggatcctgataagcgcttcccggctctcttgtcttttcctttgcccggacagttacaggacctgtagaacgattcttcttcggatccggtgtacgaacatagatcgcatccaactcttcctgtgtcagttcaatactggagtgcctgcgttttggaagtgtcacctctattatatccatttcatcatcatttcctgattccaatgtatgctccatatgcatatattcttcaacttcatcccaatccacaacaaatcctgctccatgtgcacagaatacagaacctgtcggattcgccagatctgcctccgaatcataggttgacgctgccagaacttcttcctgattatgacaaatatcataacctttcaacgaaactgccattcttccacgtccacctgtataggcagtgaattctttctgatatccacgcatcagggacaccggtgcacttcctgtcagcactgttgtctcttcttctattatcggtgttccgaattttccggacatattttggatatctgtcatagctcgtcctacattttctgatggaagttccattcggaattcataatatggctccagaagaatactgtctgctttctttaatccctgacgcactgcacgataagttgcctgacgaaaatctccgccttccgtatgtttctgatgtgcacgtccggaagtcagcgtaatcttcatatccgtgattggtgaacctgtcagcacacctttgtgttccttctcttccagatgtgtcagaacaagccgctgccagtttctgtccagaatatcttcactgcactctgctgcaaactgcattccagatccacgttctcccggttccagacgcagatgcacttctgcataatgacgtaatggttcaaagtgtcccacaccttctaccggtgctgtgattgtctctttgtaaacaatactcccttcaccgaattctaccagcacaccaaaacgttcctttatcatccgctgtaaaatctcaatctgcacatctcccatcaactgtacatgaatctcagaagtctgttcctcccatacaatatgaagttctggttcttcttcctctaaaatctttaggttcaaaagcatcttatgtacatcacagtcatccggaagaaggatctggtatgtcaacaccggctctaatactggtaaatctgactcttcttctgctccgattccctgcccgggtcttgtattttccaatcctgtcactgcacatactcttccggcttctactttctggacagcctcaaatttctcaccggagtagatccggatctgattgatcttttcattcagtccttccactacatcttttactttcagtcttccacctgtcactttcagataggtcagacggtttccctgattatcccttgcaatcttataaacctttgccccaaactctgccggataagtcttatcttttatatacagatcaagtccatccaaaagttcttccacgccttgagaatgtagtgccgaaccaaaataacatggaaacacctgacggtctgcaactgctttttgtactttatccagagagatccttccctcttccagatattcttccatcatatcatcttcacagacagccagctcttccagcacctcttccactgcgccctctttcgtatgtaaatatacttttccacccgggcagtcggattctgtcatgatatccacaaatggaacgacattttccccaaaacgcttgcggagttctttcagaagtttttcaccatccgttccttcctgatccattttattcacaaaaagaaaggtcggaatgtgatatctttttaataacttccataatgtctgtgtatgtccttgcacaccatctgctccactgacaacaagcaccgcgcaatccagaacctgcagaacgcgttccatctccgcagaaaagtccacatgtcccggtgtatcaagaagtgtgatcgtgcgatccttccaccggaatactgcctgcttggaaaaaatagtgatcccacgttctctttccatctgatctgtatctagaaacgcatctttatgatccactctgccaagcttcctgattgctccggcatgatagagcatgctttctgacaatgtcgtctttccggcatccacatgcgctacaatacctatatttatatatctgtctggcttattttctgagttattccccataaaatctgcccctttcattgttttctcgtttttcacttacatcatatcataagaaagaaaaggagtcgactgctcttctttacagccaactcctgctttcctttctctgttatcttctaattattcacttcatgatgcacaaccaggctttcccgatcgattgccttaaaagaataccccagatttttatagtactccattaccgtcggaagtgcctgaatggtagactccttcgcctctgtgtcatggaacaggagcattactttggtatactcatccgtttctgactgtgcgatgatctgatcttccgtaaccgttcctccatctccactgctcacattccagtcataatactggtatcccttatccaacacctgttgtgtcaactgtgtcatgattcctgccgaatatttttttgaaatagaattcgatgcgcctcccggaaaacggataaagcatggaacaaatccaagctgttcctttgccacctctcctattttctcaagatcatcaaaataagcatccacagatgcatagacctgatcatattcatgcgtatagctgtgaagtccaattgtatgtccctcatcataaaccttcttgatcataggaaaataatccggctgctgggcagtaatgaaaaaggtagctttcgcatcatactgatccagaatatcaagcacacgctgcgtatttgcagacggaccatcatcaaatgtcagataaacgactttctcatcatcctgcggatccatggttccaactgcaactcccggctgaagagacatggacttatctctttctgcctttgctgcctcttctgcttttttcgcctcttcttcggcttttttcttctcttgtgcttctttctctttctgtatttctacctgacgtaaagctgctgcttcccgcgcatttgccaccatacatacacctgttccgacaatcgcaaaaaacacaagacctaccagtatgttgaaataaatattgttctcctgacgcattcttttataactatgccagacactcaccagtacatcttttatctttatcaacatttcctttatcttttgctgcattctctcccaatccctctgcgttactgtaaacaacgctctttttcttacggatattgctgacatcaccatttccatcatctttagcatacaatatccatatggttatatttattataaaccatacttcttaaatatgtagtaatgattcattaagaattattcgaaaaatgttacatttctgttactcactatcctgcactactgttcacactacatgagaccagcaatgcatccccatccatccgtatttgaccattttctttacaggtgttaaaataactttacagataagcaatcaccgcattcgtataatctgccacagaacacagaaaggagaatatccgcaatggaggataagcgtatcaccaaaacaaaacgtgctttaaagtctgctcttttaaagcttttgaccacacaggcttttgatgtgatttcaatcacggaattatgtaagattgccaatgtcagccggatcactttctacacacattataaggataaatttgccctccttgacgacattttcaatgatatgctgattattggaaaagaaggataccatcgcagacaagaggaaaacaatcctgaaaacaatctcacacagggatatctgaacgttttggacagtattttgtctctttactatgaacgttatgattttttccagcatgtcgtaccggaaacaaatccttacctggcttttcgattttatcggatcctcttagacacggtagaatctcatacagataagctgaaagcttcttattctttaaaatattctgcaagacagattgccggattcatctgctttggtctgttcggatttatcagtgagtcttatacatcaaaagtaccgttagaacaggttcaggccggagcaagacaacttttaacagatcttctgcaatccaaaattcttgtataatgttttgcatttgtaactgttcaaagccaagcaaaatttcaaaaaagatgtaaaatgcttgcatttttagatttaaacatgaaaaagaacatgccccacagtttcaagacttcttaaacagaaacttttattctctggtcatgttcttttttatttttaatagttacgcctctttttctttgtaatgatgcgcctcttcgagcatcatatctttcactttcatcagtcggatctgtgtactacgctcattctcatccagtttcatcgtaatgtatttgatactttcctctgtctctggaatgataacatgctccagtgcatttacacgacgtcttgtcttctcaatctctgccgccatcagctgacatgctttttcacattctgcaagtcggatcatatctgggaggatatctgataaagacttcactgctccatcaagatcactggaagtaaacgcaaatccataagaatagatatcattttcatccgctgttcttgttttggatgtgaaggtcggaatctcaacgctcataacattcttctcatcaactataagtccaacttcctgcttcggagccatcaatgcagtattcagtgctgcctctgacattccggcccgggcaataacaaaattacggttcgcagagagaattccttcttctacacgaagtctcacttccatattttctcggacaagatccagatactggcgcatcagctcatcacgcttatctttcaaaagcttgtgaccacgaatggctgtaatccgctttttcttcaaacgagttagttccatacgggttggattcacttgtttcgcagccaataccgccacctcctctttctatcttcgatcactctgtctattcttactctttgtcgtaatattcatccagatatttatcgtcaattcgtttgagttcggtacgcggcagcatgcgaagcagcttccagccgatattcaatgtttcctcaatgcttcggtctgtctgatatccctgagatacatattctttctcaaatgcatctgcgaaacgtgcatatttcaggtcaatttctgtcagtgcggcctctcccaggataaccatcagctcttttgcatctttaccacgcgcataagcggcaaacaactgattcattgtattggaatgatctgctcttgtcttacctgctccgattcctttatctttcagacgggacagagatggaagaacatcaattggaggtgttactccttttctgtaaagctcacgacttaagatgatctgtccttccgtgatatatcctgtcaggtcagggattggatgagtcttgtcatcctcaggcattgtcaggatcgggatcattgtgatacttcccttcttgccattctgacgccctgctctttcatacagtgttgcaaggtctgtgtacagatatcccggatatccacgacgtccaggaacttcttttctggctgcagatacctcacgcaatgcatctgcgtagtttgtgatatctgtcagaataacaaggacatgcatatccttttcaaatgcaagatattccgctgctgtcagcgccatacgtggtgttgcgatacgctcgattgccgggtcattcgcaaggtttacaaacaatactgttctgtcgagtgctcctgtctcacggaagctttcgataaagaagttagactcctcgaaagtaatacccatagcagcaaatacaaccgcaaagttttcatttgttccaagtacctttgcctgacgggcaatctgtgctgccaactgtgcatgcggcagaccggatgctgagaagattggaagcttctgtccacgaaccagtgtattcaatccatcaattgcagatactcctgtctggataaactcctccgggtagcatctggccgctggattcatcggaagaccattgatgtccattctggcatccggaaggatctgcggaccctcatcaatcggattaccaagtccatcaaagacacgtccaagcatatcttctgatacgccaagttccatgcttcgtccaagaaatcggactttgctgttggagaggttaatacctgttgaactttcaaacagctgtacaaggacatcgcttccgttcacttccagaactttacatcttctagtctctccgctcgccagctcgatctctccaagctcatcatatgttacgccttctaccccatgcaccagcatcagaggtccggccacttcctgaatggttctatattcttttggcatttaaccttcctcctttacaaatgctgctgcgatttgagcgcttaatgtctcatcaacctgtttaaattcttcgtcaagcttatcttctgtcacatatttaaaacgtccgatctgctctctgaccggcattgagatcagcttctgaagtgatgcaccatcttttaatgcatcggttgctctgtcaaagaattcgttaacgagaaccatcatcatgtgctgtttcttcaatgacgtatacgtatctacttcatggaaagagttctgatgcaggaagtcctcacgaatcgatcttgcagcttccatcttcagacggtcggacggtgaaagtgcgtccatacctaccatcttaacgatctcttccagttctgcttcttcctgaagcagtgtcatcatcttctgacggccttccatccagtcttcggcaacctgtccgttaaaccatttttccatatcatccagatacagggagtaactcttcaaccagttgattgccgggaaatgtctcttgtatgccagggaagcatccagtccccagaacactttgacgatacgaagtgtagcctgagataccggctcagatgtatcaccacccggaggagatactgctccgataacggaaagtgctccttctcttccttcttttccaagagaaactacatgtccggcacgctcataaaactgagccagacgacttccaagataagccggatatccttcttcaccaggcatctcttccagacgtcctgacatctcacgaagtgcctcagcccaacgggatgttgaatctgccataagtgctacagaatatcccatatcacggaaatactctgctattgtaattcctgtgtaaatggatgcctcacgagctgcaaccggcatatccgatgtatttgcgatcagaacagttctctgcatcaaaggctgtcctgtcttcgggtccttcagttcagggaactcgttcagaacgtctgtcatctcatttccacgctctccacatccgatgtagacaacaatatctgcctcagcccattttgcaagctgatgctggattactgtctttccacttccgaaaggtcccggaacggccgcaacaccgcccttggcgattgggaagaatgtatcgataacacgctgtcctgttacaagtggcatctccggtggaagtttcttcttatacggacgaccgcgacgaaccggccacttctgcatcatagttaattctttttcgcctttttctgtttcaacaactgctacaatatcttctactgtaaatgtgccttctttgatttccttgattgttcctttaattccgtaaggaaccatgatcttctgctgtacaagaactgtttcctgaactgtaccgatcacatctcctgtctctacttcatctccaacctttacagtaggaacaaactcccatttcagatttctcttaagagacggaacttcaactcctcttttcaggttgtttccggaaatcttcataatatcatccagtggtctctggattccgtcataaatacttgcgatcagaccaggccctaattctacagacattggaacatccatagattcaaccggttctccgggtccgagacctgatgtctcttcatatacctggatggatgcctcgtcaccgtgcatctcaatgatctctccgatcagacgctgttccgatacacggacaacgtcaaacatattcgcatcacgcattccctctgcgataacaagaggtcctgcgacttttttaatcactcctgtgctcattcgcttactcctccaaacagaatatctgatccgacggcctgctcaactgtcttcttcacgccttcaactccggctcctgtattccccgacacacccgggatctgaataatcgccggaaatgtctgctcaccgtacttgttgatttctgacggaatctgtgcagccacagcctctgtaatatagataatgccgtaatttccttctgcaagctggcgaagctttgtcttcgcctcatcccggtccttcacagggcagatgctaagaccgagggtggcaaatccatagatactgtcataatcgcccattactgcaatcttatacatacatctcccttatcctttcccggattgcttcatccggaaattcattctgctttccggtcagtataatccgtactgtcttgatctcattttgtctggctaacagatacgccagaagcggtccaacggaaaatgattcatatttctgtgacctcatagaatctgtcattttattatcacaccagcgttcaaatgcagacggtgatatacgcagtgcatcggcaccttcacgataagatgttccttccagatactgtgcgatctcctccgcaccggccaatgctgcctgtgtcagctgattcacattgatctcggaacaatttaccattgctttcttcataaattctgcattttttcctgtcttctgagatcttactgcaatcttaatatcagcgattgcaactgctgtctgtgcatactcttcaatgatcttctcacctgattttttccctgcttccagcatagcttccagtgttgcgtgatcaataataagatcgcacagctgtccatctcttgtgtgaagcagagtgtcaaatgcttctcttgctgttgctggcatattacccggcagcttatcaaattctttgttctggacaagtgcaaacatctcttctccaggaatctcacagtcatcgtaaaaaatatttttattctctacttccgtacacacttctttgatcgctgctttcagattgtgataaagttttggaagtgacagaacatcgaatacatgcatatccggtgccacctcacggattgtctgccacatcttctcttcttccttattcagaacttcatctgcatccaacgttcctgctgtcagatctccccagcccttttcaaccagaagctgtagagcctgttctgcactcttgcacgcaagaagctgttcaatcactgcattcgttaaaagagagacttccagtgcacggattctggcaaccgcataggtatattttgtcttactcaagattatccctccttgcggctacactgctgtaaacagctgccggttcactttatctgataactcttctcttcttgcatcaaacaacgctttgatcgtacaattttcttcgatgccgccataggtcaggataaatcccccatccattccgtccggcactgtctctgtaagttccaggcttccgcctttcttcttcgctgtttcatatactttttccatatacccttgaggcatacgttttctgtctttctctgtaaagcagatggttccttcttccggaagtacatacttctcaagaaccttttcaagcattgcaaaataagctgcatcatcaagctctccgactgctttgtaagcatcttcaagaacttcactgatcacttcctgtttcgcctcaagtactgccttgcgctttctcatatctgatgaagaggccaggcgtttcacagaatcttctgctctggcttctgcctgtgcgacaatcttccgtgcatctttctctgcctgtgcttttgcttccccaattatagaatccgcctgtgcgtgtgcctgtgcgagtatctcttttgcattgtcctgcgcctctgcgattatctgcgctttcattttgtcaagtccactcatctccacgctctcctttttatttatttcttacagctggataccacttactgcgaggaaggaaatcagaagagccaggatcgcatatgtctcaaccattgccgggaacagcattgctttaccaaactgctctggcttctttgctacgattccgatagaagccgctgctgtcttaccctgtgcgatacctgaaatcaatccaacaataccgattgggagacaagctgcaaggatcataagtcctgactgaacgctaacttctactccgccaccgccgagaataccaattttagaaagtgtaataaatccaacaagcagtccatacagtccctgtgtacctgggagcagctgcataataagtactttagcgaatttgctcgggtcttctgttacaacacctgatgctgcctgtcctgcgatacctacacctaacgcagatcctgcacctgcgaataatactgcgattgctgcgcctaataatccatatacaactccaagttcacctgctatattcataatgttgtttcctccttaacatcaacatatttcgtattttctttaaaaggctcgaatgcttttccgccgccttcataaaattttccgaagaattccacaaactgtaaacggtttgtgtgtacataagctcccagcagattgatcgccaggttcaatacgtgtcccacaatgaagatcacaatgaaaagaatcacaccgatcacattgtttggaagcatcgctcccatctgattgataacggatgcgataactcctgttgcaagtccaagtgcaagaagtcttgaataggacaatgcgtcactgagccatcctgtcacgttatacaaatcatacgctccaagcgcaagccgaagcgccggattcttgtttgctcttcctggcatcagcacaataccgattgctccacccgcagccatcacttttgcagcagtgttcaaagccgccgggaacacgatcgtagtctgtgcaatcgatgcgaaaatatcacttggaagcagcatcaggatcaacccgatcagcatcacaaaccaaagtacaacgtcacagataaaatctacaaccttaccatcttttaaacacagataacctttaattccaagtcctacgaacaaatgaattgttccaaataacaaagaataaaccagaagtttcattggatcattcaatggaacaaaccaaagtgccggaactgttaccgtatgtccgaagaatttttctgaaacaatgtctacgatatttccaaaatatcctccaaatagaacaccccatacaagtgtagatactccacagtagaagaacaatttcaaagattttgccatgttctgtgacattcttggatatttcttcacaagaatcgcacacacaattgcaacaactgctccatacgctgcatctgacaacatcattccgaaaaaaaatacatagaagaatgacatgatcgttgtcggatcgatctctccggcatgcggtaatccgtaagattctacaatgccttccatgtttgtagagaatgggttattctttaaaataaccggtgcttcttcaccttcttcaatgtcttcaatatctaccatacagttatatttctctgtcaaagatttctctaccggacctgactcacatgccggtatatatccactgatcacaaatgtacgctttgactgaagaagatctccgagaactgcatacttatctgctcggactctgtaataatctgctacggcctgaagttcttttcttttggaagccaggctcttaagttctgcctcgcactgcgtcatccgctctcttgacgctgctatctctgtttccagtacttccttctgctcttttggtgtcttgctccagttctgggacggtcttgcaaatcctgcactccgaagtgcttcttccactgtctggagttgttctttcaaacagatgactgcaatgcagatcatattagattctgctgaaactaaatgtacatcgacccctgttttctccatcacttccggagtcttctcaagtagaatggaataaatgttctcaagagtaagctctcccggcattgttcccaggatcaaagcagtcctttttgtcttcccttcctgaagcggaacatctaatgccatccacggcatcagactttcaatctgattctcaatctttgctatgcctgctctaagctcagcatactcgcgatcaagatcataaattccgcgggctgtcttgatcaattccggtccagatatctgaaccttttcttccaactcgcgatcgatcagttcttttccttccagcgaagaaagtaatgactttttctccggagcgtaaacatccagaatccccagtgcctgatctgctgccgttgccgctttttcaaatttcatccgctgtccggttgtgtccatcttttggaagaatgcatcctcttctttttccctgtcaacttcaagaactccaagatgctgtaactgttccaggattgcttttcgatctttcttcagggcacagatgctgattttctgcatcttaagtaccgccataatcttatccctccttttttgttacgaccacatggatcagattaattcagaaagaactagctgcactgctgcatcctttttctctcttgcagaaaccttcagctcttcgatcacatctttgagcttctctgcttctttatcttcctgatttttcgcctcttctctggctttctcatccagtccaccggcagttctttttgcctcttctacaagttcttcatgaatctgctttgcctgaagagatgcatctttcagaatctgttctttttgttcctgcgcttttacaagaatctcttctgcctgctgttctgcttctttaattgaccggattgtctcatccaccatagtatctacaccacctttcttgtcttccccttttttattgttcttatgtgattttgaacaataagatttcttcgctgcatgttgttactgcacattaatatctaaggattacgctgttcgcagcacgtatcaatatattattaccatacttttctttcctattctctttctgtttgtaactttcgcacaacgatgttattttaaacatagcatattttgtcgtaataatcaaactttttattagatttttataaaaattttttagattactaaatatttcgtctattttttgtagtttattaaacgttttttgtgtatttgtataaatatctgattatttgataatacaagggtcaaaagatcatgcgtttcatgcttgcatgaaatgcgaagcaatccggttacatcagtgagtggcaaaatttacttttgacactcacatcattatttaccattcaaaaaaggaacaagatcaaacctttttacaaatgatttgaccctgttcctttttcactttatttccaatgaagttcatgcagttctccacttaaattcattcctgcaaatccattctgtcgcagtgcttcatacaacacaattgccaccgaattaccaagattcaatgagcggatatctccgttcatcgggattctcatacagtcttcctcatgctctacaagaatctcttccgggattcccgcactctcttttccgaacataatatagcaatccggctcataatctacatctgtatagaccttgtgcgcttttgttgtcgccatatagatttttgctcccggatttttttcaagaaaatcctgataatcaatataagttgtcacatcaagatcgttccagtaatccatgcctgcgcgctttaatgctttctcattcagcttaaatcccaatggctcgatcagatgaagccttgtccctgttgccacacaggttcttccgatatttccggtatttgccggaatttccggctcataaagtacaatgtttaacataattatcgcctcttctatcttcttgttcttctgattcttttcgttctttccaccagcggctcagttcatccggtgccggacgatccagataacgggtttcttctccatttacaagtgttcttgcattctgttcttttacaaatccgatccttactgccggaacacctgcattcttcaagctttccaatgtctcttctccatgctctgtcaatacgagataacttccggctgatgtgagaagatatggattcagctgaaagaattcacagatttccaccgtttcctgcttaagtgcaagttttgaaaaatcaatctcaaaccctatcttttctgcctctgcaagttcccataatccgcagagtacacctccatccccacactgtctgctcttcgcttcttccggaagctttaaaatctgtttcggaagtatcagtgattccttgcaacgctttgttttttctataaaagatggtgtaaatcttgtacgaagatctgcctctgtctcttcaaccaatcgcaacgttccttctaatcccgtataaccgcaaagaatgatttccgttcccgaaacccattttttcatctgctgttttgagttttctttcacgccgacagcagtaatatgaatcactgtctgcaaaacatactctgcactttcagcctgtacacaggtaatggcaagtcctgtctcctcacaaatctctgtcaggattctcataatatcttttaattcctgctcgtcagaactttcaggaaacaaaatctgtactgaaaccgctgttggtctgactctctttgccgcaagatctcctgctgatttaattactgcatatttcacctgtgccggtgcttttccgcttactgaagcgctgctccagacaaaatccttatcgtcagatgccagttcagaactgctttcttcccacgcggcttttcctgttgaattcctgtttactttttggatctgtttctttacagaacgattccagatcgtctgcgttactctccctgtccgcattacactctccttagaccagatatggaatcaccatcgttgcaaccattgcaacaataaccaccaaaataataattgacaccaaacgtcttacttttttatcataaaaattcatcttttttctccatttccattaacaaaaccatatgcaaatatctttctaatatctgcaacgctatactagtcctctattatataaatcgccgcatcctgattcaacttatttctatgtctgtaatcaaaaagatacaactttccattcaatcgctccagatgagtcatctttcgcagttggcggctgtcgtatccttcataatcctttagatacttgtgctcttctgcctctttcttataaaattcagacgctacatctttttctactttgctctctccaagaaatgccggacgattcttcacattatctctcaagtaaagatctaaagtcatgctttcaagcaccttctctttaaaatccgcttctttcttctgcacttcctccgagcagctgaattctgctaattctgattctacaaagtcccacaatatctcataacgtgcaagtcttgagtgattcaaaccaaacaagcctttcttctcataataattgcccattttctcatacatggaaaatgcggatggaaacaattccacaagaagtcccatcgtatgactaaactgaaaactgttatagtaaacttccaccatctcttctactttcttcagacggatcacatcactgtatggaagccattttgttgaaagcacttcatacggcggacgattctggcaaagcagctcatactctttcatcttctcatgcatcacagatccatgcagtactttcagaaatccaagctgaaactgatccggttccatagcataaacttcattaaaagaatgagcaaaactatcataattctcatatggaagacctgcgatcaaatctaaatgctgatgcacatttcccttctcatgaatccttgctaccttatcacgtactttttccagattcatggaacggttgatctctttgatcgtctgtttattcgttgactgaattccaatttccagctgaatgagtcctggacgcaaactccggatcaattcaatctcttcctcattcagaagatctgctgccacttcaaaatgaaaatttgtaatccctttatcatgctctttgatataattccagattgccatcgcatgatcatgcttacagttaaatgttctgtcaacaaacttaacctgtggcacttcatgatcaataaaaaactgcagttctttcttcacaagctccaggttacggaatcgaagacatttatcaattgaagaaagacaataactacaagaaaacggacatcctctgctcgtctcataataaatgatacggttcttgaaattctcaatatccccatagacaaacggtactttgctcagatccatgatctgtcgaaacggtgtcgcagcaatctgtttttccttttcccgaaatgtgattccctgaatattgatcaactcagctgcaccacggccttcataatatgccacaagttctgcaaaagtctcttcaccctctccgcgcatgataccttctgccatcggatatttctccagaacttctcttgcattataagaaacttccggacctccaagccagatcttcgtatccggcagaatctttggaatctcctgtatcaattgtcctacttctgtcacattccataaataacaggaaaggcagagaacatctggtgcctgcttataaatatccatcaaaatctcatcaaatggctgattgatcgtatattcagaaattgtaatattgctagccggatgctgctcttttgcatatgcgcgcaggcaatagaccgcaagatttgagtggatgtactttgcattcaccgctgcaagcaaaatcttcatctttttataaacctcttttcctgtcaataatgtatatttgtaaacattttcctttttaggtcttacctttctattctgaatgaagatgtgagaaatgtcaagatatgtgaagttgtgtatataacattgtatataacataaaaagggaaatctgttactgttcacacgatgtgcgaccagcaacgcatctcgccattttaaatcgcctttggcgatggggcgagatgcattcaagtcaaaacatgcatcctccgtgtcaatcagcggagtgattgacacgggagtgaacagtaaagggaaagctatcacttacgataacgacacaaattgtgtcagattatcgtatgatagctttcccttattttgcagctttaatcaaaagccacctcttctttctgctcctcacggaaaataaccccaaatacttttctgacaatcggtcctgcgaagcacagttgccagaagaatgccattgggaaattgaatactgttgtctggaaccacacagcaatcatctgatttcctgcatccttaaagagcagtgttgctgcaaggctcatcagcgggcacattccaatgatggataaaacggatatcgccagcacgatcataaacggattatctttctgtggatttacgatcataaatgctttcttctttgcaatcggtcctacgagaaagaaatccagaatgaaagcaatcggtcccatgatgataagttcatggaatgctgccagaaagacctcattactcattcctcccatattcagagagatgttgtagcagatcattgcataaaccatgacaaaaaccatcatgattgtgaaaattacttcttgaaacttattttttggcataaaaaatcctcctatcatgataagcgtaacagattgtgttgttcgttcatcattccggagggaatgtatcgtttccaatataaataccattctattcattttttacgtgcattgcgcttcgaacttggcccacaagcgttaccccggtagttaactcagcccaggcaccctcacggcacccgagaggttctgcttagtgctgctccgttcccgacctgacacggttcacagagtcccgtcgcgtgagacccagacgtcaacgtcactttccgggggcagccctgcagactgtcgccctctgcgcaatatcacccctgctatagcggattgcaggttcaaggtaccgctaccaccccggctgcacggattattattttacatgataaataaatgcttgtcaagtatgctgctctttcttttgcacaagattccacatgattttatacctctgtgttacagactctgtgcttctgcttttttcttcatcttcctggcttccctgagttctctgaaaaactgcttcatcaactggctgcattcttcttccaatacacctgttgtaagatctgcctgatgattaaatgcctggatatccagtagattcagaatggaacctgtacatcctgctttcggattcatacacccgacaaccactcttggtatacgggactggacaattgcacctgcacacatctgacatggctctaatgtcacatacaatgtacattcttccagacgccagtcaccaagctttttgcttgctttcttgattgctgcgacctcagcatgtgccagtggattcttgtctgtattccgtcggttataaccgcgtgcaataatcttatcttcatgaacgatcacgcaaccaatcggggtttctcccagattatacgctttctctgcctgttttaaggccgcacgcatatatttttcatccgttgtcatcctcattttgtttcctttcggttattgtataaaaatagcattaatattccttttcattctgaataaactatatagaaaaattcttttcaggggcttgctatgaatccgggaagttattatttatatgagtacgaatcctgctgccgccgcagaaatcttggttttctacaaatttcatcacataattattcttatctcttaacacttcatgttaaaaatcttccgattgtccctggagaacagttggaagtccatgcatttattctcgaaaatcaaacacttataggttctccggttgcacttcttcagtgctctggtcagaacttatccacacaactggtcatttccggggaacgttttccacataaaagaactcttaaacacattgatgggttcattattttctccatcacccagaatcgatcacagcattggattgcctccgctgtacctctgccggatttttattctttttctgattgctctttatcaacagaagagagtttatcctctgaacctgagaatccatccctttcggaagaatccctcataacagaagacactgtatctgagactgtatccgaagcagcattatctgacgcttctattgatgctgcttcaactgaagaggtaccaactgaggtgacaccaactgaggagactgcaattcaggacgcttcaattcaagccagaaaaatcacacacgcagagatttccacacttccgcgcagattctggccacttgccaacaatagttttcttctgcatggctgtcataattatcatcaccttctcctgatcaaagaaaaggatcatctttggcttggcgttcccggtctttacgatcccagagaagcacatatggctaacttgttcggctttcctcaatttaccagttcttacatctctattctgaaacttaccgaagatgaatgtgaaaactctgaatctttcggtcactggtgtcgatacttaatgtgattcttaaaaagaaaggaaaaagatagagaaaggaagcgttcacagcggatgcacttcttttctctatcaattttaatccagataaattggcggttcgtaatcctctccaagaagtactttcttgcgttcctgatatccgaggaatgcccattctgtcatatctgtccatttatgatttgcacggtcataaacctgcacatatccaattcttttcggatgcatacgtacgctgttggattcatattctcttcctgtgtatggattaatgtctccaacctcttcctgtacaggctcttcgtatgttgcctcttcctgcaccggctctgcctgctgtgtctcataagatgtaacttctgcttcttcatatggttctgcttcttcctctgccggctgatcataatcttctgtataagaaacttctggttccgcagagttttcttcttcctgatctgattccggcacttcctgaagctcttccttatattcctcttctgtctgaagatcttctctgacatcttcagttggctctgcttctactgcattcttttcaagttcagcaagttcttcatgcatatcataaatctcaccgatcgtcatgtcacgttcttcacctgtaagctgctgttcttccttctctgtctccaccgtttcctctgaaaagctctcttccggctgttcctgttcattccattttacttcctgcttcctgatacgtccggctgcgctctctgtaatctctcctgacatgatactcagctgaaacggacagcccaaaatagatgcgatcaatctcatatcctgttcctgaaaattatcccttccaagacgctgtgttaaattctggcgggacatcttctttcctgtctctttctcaatcgtctccgccagttctttgatcgtcattccttttcttcccaggacgattttcacctgttctccaaatgttaaatcttccatttacttctcctccttatgtattatttatacttctctcttatctgtcgatcagaacagtttttcacttaatttgcagaatcatattcttccaaagtaagtccattctctgtcatctcttttgcagcatctactcccacataacgataatgccacggctcatatacaattcctgtaatatcagatttatcctgcggaaaccgaagaacaaaaccatactctgaacaatgttccatcaaccacttttgctcttctgtatctccctgtttctcatcaagctccccgtactttgtcgacataatgtcaaccgcaagaccagttgcatgctcgcttgttcctggaattgcaactgatttttttgtctcatcatacgcatttaacggtgtatatccctgattgatccagtcctgcatcgtcgtattaaagacatctctctgcttctcataagaacgatatcctgatgtcacatacatgctgagtcctgccttcttcgcatcatccagcatcttattcagactgtctgccatcctggaatctacctgttttccaccacttatctccgtcagcttcgccggcacataagaagtatccaatggatgcttctcattcacaagtgcaagacaccaccggtcatcatcacttgccagcaactctgcagtattttctgttacttcttctctgtctaactctgcctgcagttcttcgttctcctttgtctgctcctgtaattttgcattgctgatttccaacttcttttcagcttttttcaatgtaattgaggagattcctgaagtaattgccactcctgcaattactcctgccaaagcacctgtaagcattagtttctttgctctgtctctgaacaatactttattcatcttatttaatttcaactccatctgtatttttcatcttatcctctgtaatatttagaatcttttccgtttcatccccccggcagatcatcctattccttcagatatcgcacttcaaatgtctccactttgatcggtttattaaataatgttccctgtgcataatcgcatcctaattcctgaagaacattcagctgatcctgtgtttcaacactctccgcaagaacagaacatcccaattgatgacaaatatcaattacggcctttgctaccactctgcttcttctgtttccaaccagatttgtaatcaggctctcatccagcttcaatccatcaaaatccataatggacagaatcgaaaagctggaattcttagctccgaaatgatccaatactacgcgaacattcgcttttctgatcttactgcatgatgccgccagcatctcctgattcgtatctgtataagattcggatacttctacttccaaatattcgcataatacctgatatttctcaatcagcgcactcatctgatccgcaatgttctcctgcctcaatgtttcacctgcaaagtttactgaaatcggcaccatctggattccttctgtctcccacttatgaaggatctgacatacctgttcaaatatatagagatcgagataatgtgacaaccttgtctcttccagcagattaatatatcttcccggatccataattccaagatccttatgatgatatctgacaatcgcttcagcacctgcaatttctccggtctgcacatcaatcttcggtaccagacatacaataaaattcttctgttcaatatcctccagaagatcctttttgatgattggctcatgatggcctttacgcagatttttataatacttctttttctcttcccgcatcatattctctgcactgatcacaagaccattcacatctatgtctacttttccccaggcataccctactgaaaccagtcccagacttatgttctcaagctttgtatatgcactatgtacctgttgtgtgaaatcttcatatgaagcgttctctacaagaaccagatactcatctcctgtcattctgtatacattaccattatggaaatactccgaaagcacttcaccaactctggtgacaacttcatctccataatctctgccaaattctttattaaaattcttcagtccattaatgtctacagaaagagctcccaatgtcttcaattcttccggttccacatgatccagatatgcaacaaaactatttctgttaagtactcctgtcagattatcatgataactgagatactcctgttgtttctggagtttatgaagagtgattgcctgcggtatatacggaatcaccgtacgaagcaatccaacatcacatccgccccggtgaactccaactgctgcaagaattgctactgtattctcatccagctgcaaactcacactgtaatcggcctctgttgaatttgtaatctcctgcttcatccactttggctgctgttcttccggaagcatctttatcttatctctctgccatggaacattctctgcacaccactcaaagatggtctcaatatccccatactctttctcaatatagtacacgtattctgaatcataataatcacgtaccgcacgaagtacatcatttacgatttctgaaagagatcgtggcttttttctatcactcatatcgtttttcctctgtctttctataattttagacactcagataagattattgtattatactacgaattaaaatgcaatacaaaaaagtttcgcagttcacttttaaatgtaaaaaagagggggattttccattccggaaaatctgtccctcttctataattaaatgatatatcctgcaggtacttctgatctctgcacatctacatgctctagaaatctataaattccactttttatcctgtgaaacacgaagtcggttcatcgctcttgccagagatgcctgcgtatgataatactgctggatactctgctgctgacgtaacctttcctctgcacgctctttctgctcctgtgctcgtcgcacatcgatgtcttctggtttctcggctgtatcaacaatcagtgtaactcggttgtttacgatttcaacaaatcccacgcccactgcaatgtctttccaatcttcgccgtccagactcatatgtgcaactccgacattcacagcgattaccatattctcatgatttgcaagaattcccttttctccatccggagccggaatgatcagcttcttacaacgaccttcgtagaatacaccatcacttgctatgattttcagaccaaatgtatccatatgcacattctcctatttcaacaattactcttcttccatctcttttgccttggcaattacatcatcaattgttccgacattgaagaaagcgttttccggataagcatccatctctccatcgatgatcatcttaaatccacggattgtctcttttaatggtacatattttccaggaattcctgtaaatgtctctgctacgaagaatggctgggacaggaatttctgaatctttcttgcacgcataacagttgctttatcctcatctgaaagctcttccataccaaggattgcaatgatatcctgcagttctttatatttctgaagaattgcgatcaccttgttggctacttcgtaatgttcttctcctacaacgtctgcttccaggatacgggaacttgactccagcggatctacggccggataaataccctgctcaacgatctttctggaaagtacggttgttgcatccaggtgggcaaatgttgttgccggagccgggtctgtcaggtcgtcggccggtacatatactgcctgaaccgatgttacagaaccgttctttgtagatgcgatacgctcctgaagttcacccatttctgttgccagtgtcggctgataacctacggctgaaggcatacgtccaagaagagctgatacctcagatccagcctgtgtaaaacggaaaatattatcgataaagagaagcacgttctgatgctgctcatcacggaaatattctgccattgtaagtcctgtctcagcgacacgcatacgagctccaggtggctcattcatctgtccgaataccagggccgttttctccagtactccggattctttcatctctgtccagaggtcgttaccctcacgggaacgctctccaactcctgtaaaaatggaatatccgccatgctctgttgcaatgttacggatcaattcctgaatcagcacggtcttacctacaccggcaccaccgaacagaccaatcttaccaccttttgcataaggagcaagaaggtcgataactttaatacctgtctcaaggatctctactaccgggctctgatcctcgaatgtaggcggctgtctgtggattacccattttttagaatctgtaatcggctcttcgttatcaattgtctcgccgagtacattaaataatcttccaagtgtctgctcgccgacaggaacctgaataccggctcctgttgcagtaacttccatatctttgcaaagtccttcacttgcagcaagcatcaggcagcgcacctcattatttccaaggtgctgtgcaacctccatgatgcatttctttccattattatcaacttcaagagcatctttgataaaaggaagatcaccgttttcaaacactacgtcaacgacaggtcccataacctgtacaattcgtcctttattcatgttctctctctctttctatatttcagtcattacaaactgcaacaacctgctgtctgtaacgcatctcgacattttaactcttcttctgctgagctcttgcgccggcacaaacctctgtgatctcctgtgtgatcgcagcctgtcttgctctgttatagaggattgacagatctttgatcagatcctgtgcactgtctgttgctgacttcattgccatcatacgggcattatgctcactggcataagcctcaaccagacatccgtagatcataccgttgatataacttggtacaatactgttcatgacatccataggagatggatttagttcgatttcctcgcgatacatattcaaaggcatcgtcatttcgccaaagtcccctctctcgagtggaagaagttttaacacttctgcctctgactgaactgcattttccattcgtgtatatactacgtaaacttcatccagctcatgattgttaaactgatccagaataaccgctgaaatgtcacgggcacgatgcatggtcggcttctgaactgtgtaacggaagtttgtatcaatatctacatccttctttgcgaaataatgacgtccaagctctcccacaacaaaaagcttatgctgacccggcttggaaagaatctcttcctcaagcttcacaatattgtgattgtatgcaccggccagtcccttgtccgccgtgataacgatcgatccaatcttacgttcctctgccggaatgttttccctcttgttgaaataactatgatgtaattctggtagatgacgtaaaatacgactgatctcaccctgcagcgcatagaaatatggttctgtatctgccagcttctttctcgcctgtgtcagtttggaagaagagatcatatacattgcattggtaatcttcattgtgtctttgacactgttgattctgctctgtatctctctgatatttgccatattaacacctgctcttcttgaattccttcgctgtctctacgatcttgtcgatcagttcctctgtcaggactttcttctcttcgatttcctgaccgatttccggatgctctgtctcgaacatctgaagcatatcatactggaactgtttgatttttgtcttctcaacacctaagagtactttatgtgttgctgcacacagtgtaattactttctcatgcaaggaaagtggatgatacagtggctgtttcagaagttccatcagaccacttccatattccagttcttccttcgtagctgcatcaagatctgaactgaactgtgtgaagacttccatctcacgatactgcgccagatcgatacgaatacttcctgatgctttcttcattgcttttgtctgagctgcaccaccaacacgggatacggaaagtccaacgttgaccgccggtctcattcctgatgcgaaaagtccactctccaggaagatctgtccatctgtaatggaaataacattcgtcggaatatatgctgatacatctcctgcctgtgtttcaatgattggaagtgctgtgatagaacctccgcccatctcatcactcaaacggctggatctctccagaagtcttgaatgcaggtagaatacgtctccaggatatgcctcacgtcccggagaacgtccaagcagaagagaaagtgcacggtatgcaaccgcatgcttggaaagatcatcataaatgatcagtgcatcttttcccttgtgcataaagtactctgccatagcagttcctgcatatggtgcaatatactgaagcggagcacagtcacttgctgtggaagatacgataatcgtataatccattgctccgtgtgtctgtaatgtgttaacaactttggctactgtagatgctttctgtccgattgcaacataaacacagatcacatctttgcctttctgattcaggattgtatccagtgcaatggatgtctttcctgtctgacggtctccgatgatcagctcacgctgtccacggccgattgggaacattgcatcgatggaaaggatacctgtctcaagcggaacgcttactgacttacgatcaacaattccaggtgcctcattctcgattggacgatagtcgtcagatttgatctcaccttttccgtcaatcgcctcaccaagggcgttgacaactcttcctacataagcgtctccaaccggaacgcctgctttctttcctgtacgggctacctttgtgccttcacggattcctgtgtcacttccaagaaggatacatccgatctcattcttacgaatatcctgtaccattcccttaaggccgttttcaaaagtaacgatttccccgtacatggcgtgatcaatcccgtagattgtggcgataccatcgccgacagtaacaacagtacctacttcactgtccttactcattgtatcaaaattctctatttcttctttcaggatagaaataatttcatctgaattgattgaactcaccttgttcacctccaggtcaatctttgttctaatctgttcaggcgccctttcatactccagtcatactcatcactgccaacccggagaataaatcctccaagcagtgctttgtcctggcgaacttcgattttagcacgatttgcgccatatttcttgcaaaggaacgcctccattccttttttctgttcctccgtcggaggctgaatacatgtcagaactgcgttcagaacctgattctgttcatcacagtatctgtcatatgctgtgaagatatcttcgatcagatccattctctgatatctgcacgctactttaaggaaattttttatctcctttggaaatactctatctaccacattcatttttttctgaagttcaatggtaggattcgcgaaaatctcgtgaagctgcggtacttcctcaaaaatctcacgtgttttctgtacagcttcttttgggacacctacttcatacaggacacgtgcatatctgattgctgccattgggcagtaaatctgactcttacttgtctgtgttttcatctgtcccacctacttctcccaaaaactggtcataaatgttctgctctttgtctcccacgatcttctcagcggatgccatagccagtcctgcaatctgagtctgaagatctttcattgtcttctcgcgctcaatacgtacattctcttttgcagcttccagaagatctccggccttgcttcctgcttcacttacgatgcggtcatactctgtcttagcctctgagcgtgccttctcaacaatcgctgctgattcaagctttgctccctttaaagcatcttcatattcctgtttcatcttctgcgcatcactctgtgcatcctgtgcaccctgaagaccatctgcgatcatctgtctgcgcttctccatgatatcactcaccggtttgatcagaaaatgtctcaacaggaggaagagaacaataaggttgataatggtatagacaaggttcatatttaactgaagcaccttttacacctgcctttcctgttatctgcttccatcattttcataagattcttttcgtttcttatttcaggaagaagatgatcaggataccaatgatgaaaccgtagatagctgttgcctctgcaagagcacatccaaggataaggttcttactgatcttgctttctgcctctggctgtcttgcgatagcttctactgctttacctgttgcatgtccgataccgatacctgctccgatacctgtgaatactgcgatagctgctccaatagcaataagtgttgacataattttaatctccttttcttttcaatagaatgtgttaagttcttactccatctcttcattcataaacagagatgtcaggaatacaaatacgtatgcctgaagtaggccgtcgaaaatatcaaagtaaaaactgattggaatcggaatgatcagtggaacgattgctttcaaaagttccatgactacgaatcctgccagcatgttaccaaagagtcgcatacaaagcgacaacggccggatgacgatttccaaaatcatgatcggtgctacaattggaatcggctgtgcaaaatgctttgcccagtgtccgaatccattcttgcggatacctgagaattcaatgagacacatactcatgattgccagggctgccgtcacgttcagatctttcgtcggaggcttaaagccaaacaatggtgcaattgtgtttgaacaggcgagatataacagaaccgtaatcagatacggtacatagcccttgttctctttcccaagtactccgacaaagaagtcctcagcggcgccgataccggcttcgagagccaactgcacttttccgggattctcaacctttaagtttcttaccagaataatggatgctatcacaagcactgccatgatgatccaggtaactactacagattcattgatcccgccaagaaccggaagtgtgaacactttctcacaattcagttcttccataagattgtctgccagatttcccgtattgctccctccctttctacctaatgtatattgctgtattttgtcacttttcgtatacagcatggcaaatgttactgcttataatcgcattaaaacgtcatgttctccgaaaagttgactaaatattactcccatgttttctctttgtcaacgttccacttcaacaagttaaattcataaaaaaaacactttttttatttcaatttgctctttttttattctacgttttgtctattttttattacttttttaaccgtttttcgctcttgttttagaatccgctctttttttatgcgcattttccacaataaaattgtttttatttctgtacatttgtacgattcaaaaaaaatttcatagacacttcgtcttaatttgtatattaatgataatttttctcctgtttttcgtatccttttcagaataatagcaaaaacagatgttacatttttgttacgattttgttttctcaaaagaaaagcacccatttttaaaccatagtataggtgtgataaataaaattttatttttcaacatatacttgttttagctacgattatgtgatatagtgattgcagctaagaaaagagatgaatatgacatattcacacaaaaatgacccctcatgagccgccaactcatgaggggtcttctcttttttgatggttgagcatccattcaggctaattgtcgctgtcatctccgtctagccatttgcaaacatagtagccaactacacttgctgcgacggaaacaagaaaagagataaatatcgacatattcacaccccctttctgttgccagattaggagcgacaacatatgtattatactatataattacaaatgtaacaatatatgtttagcgttttttcaattgctggtaaacatatgataccggcagtccaaccacattatagtagtccccttcgattccatctatatacgccgcaaagcttccctggattccataagctcccgccttatccatcggatctccggttgcgatatacgcgcggatttcttcttcgctcatctcatgcacatgaacctttgtctctaccgcatggttaatgatttctttctcgcatgcattattataggaaagaattgcaacacctgtatagacttcatgtgctcttccctgaaggcttagaagaatctcatatgcatgatcttcattctttggcttgccaaggatttcttcgtcacgtacaacgattgtatctgctccgatcacaattgtatttttcaattctactccctctgcctgaagatcagatgcaacattttctgctttcatcaatgcaagttcttctacaatcttctgtggttttgtacttgtatagacttcctctttattacttacctttacctcaaattctaaaccgatttgcgcaagcagctctcgtctgcgcggagatgctgatgcaagaatgattttctgattcattatcattatcctttcctattataaaatggttgtaactgtcatttctttcctataatagcataaaaagagtggacagcaaaactaatttctgctgtccactctcttcatatttgtaaagttccactcttgtcacacttaccacacagtgctaaaataagcgcagaaactcaaacacatacaacaggctcagactttcagaggtgatataaatggaatcaaagacagaaaacagaatcaacgaatgcatttcacatctagacattacttactcttatcagctggcaaagcagatggagactcacaaaaccaatccggtactcggtttccgaactgccggttctgatgcggaacataggacaggggattttttatatgaagaaatgaaacgcatcggacttcagaatgtgacgaaggatgaattttggctggattcctggacctttgaacgtgctgtgctccgtttccaggatcaacatggagaactgcatacttgtcagatgggtgcttatcagacgaattttgagacagatggattcgagacttatgatcttgtctatgtcggtcgtggaaccgcatcggactatgaagggctcaatgtccgtggaaagctcgttcttgctgatatcaaccagcgtgatgaatggtggatcaactaccctgtctatcaggcatatttgaaaggtgctgtcggactgattgctgtccagacacagggttatgctgagattgatccgcgggcactcaatgctcaggatatcgccggaccggaatatgcccctgcattctctctttcgagacaggatgcttcttatttaaaagaacttctctgtcccgaagatcctgcagtatctcatccgtcctctgtcgcagttgaactcaacgcctcttcctgggttgaacgtaaccgcccggcttataacattaccggatatcttccgggaactgccgcttctgaaggggacgaccggatgattctgctttccgcacactacgattcctattttgacggatttcaggatgacaattgtgcggtctctatgacattcggaatcataaaggctctgattgacagtggctatcaaccgcgctataccatcgcagtatgtgcccttgctgccgaagagtggggtgtctgtgattctaaattcgactggtcaaccggagcctggaaccaggtattccgtgttcacccggagtggcagggccgcgtgatcgctgatctcaactttgaacttccggctcacgcccataacacacaggatgcaatccgctctacttatgagtctgctgattttctgaaacatttttgtgaaaatataactgttccgaaggaggcttaccctgatggactgacagtacttgcaccaatcgagacatggtcggatgatttttccatcgccatctccggtattccatctaccgtaaatgatttcagcgcaggatcgtttatggaaacgcattaccactcccaatatgacaatgaagagttctatcaggaagcagtttaccgtttccaccatgagctctatacaagacttttagttacactggatcagctgacacttccgccacttgacttttccagacattttctggcaatgaaaagttccgtcgccgactgtcttgcagcacagtccaatgccccggcagaagtattggaagaaattccagcgcttctggaaagtatttcaaaggtatgtgaatctgccgatttattatatgaaaagattcaggagatcaacaaccatactgtttccgctgacttcccaatggtgtccggactttcttctaaactgctgcacattttccggaagatgcaggactacttcgtccgcctcgactggcaggacgcagtctgcttccctcatgctgctgccagtcagaacctctgtcacctggagcaggcagtccatgcactggaaagccagaacatcaccgccgcactggaggtactctatgaagttgataataactgctacgcatttttattcgatgaagaagtctattatcactttacggaatatattttacatcaaccaaaagaccgtctgatgtggggcgccggacgcattcttcaccatgagaatctctatggccttgtccagcgtctgaaagaactggatcagatggcaatcccaggttctcttgatgttgagatcagaagacttgaagccgctatccgccgccagcaggcctacttaaaagatgatttacattatatgaaacaatctgttgataaaatccaggctttaataaacgattgccttgaaacatcatcacattataataaagaaaagaatggagaaaaccaatgaatagcgataagctctacaaagtacaggaccaggatcttgaccgccttaaagaaatactgaccgtctgctttcagaacgacccgctctacagcactctgatcgaagatgaagcaacaaaagaacgtctgctgccacatcttcttgagtgcgacgtaactgaattatttgaaacctgtgaagtctttgctgacagccctgagttgaagggagtcctgatcctttctgacgaatccgatcaccgtcatgcattttataattattttgtcagcctgaaagaaagcctcatcacagacggctggctactccacgaggatccgactatgaagacatttttcaactttgtcctcggaaaagattacctcaactccacttggaccgcccagcttcatgaaacccgaagacttcatgtcatctacctcgccgttgatccgaaattccagcatcacggtctcgcagaaatgatgatgaatgaagtcattgcctgcgccgatcgcaatgatatgatgatctctcttgagacacacaatccgaaaaacgtaccattttatgagcatcttggattcaagatattcggaatcgtggagaaacctcattttcagttaaaacaatattgtatgatcaaagaattgtaaatgttctgtacacctgttccgcagtatctgccaggtttctctttgcattttcattcttcattgcctcttccagcgtaaccacaccacgcaggatagggaaaaatgcatcaatgccatgttcattacattttctggcatctctttcgactgcgcctgcaaatgcaagtaccggcttgccgtatttctttgcgagtgcagccactccaaccggagcttttcccatcgctgtctgaccatccatccggccttcccccgtgatgacaaggtctgcatcctttacatactcttctaactgtgtctcttccagcacgattttaattcctgattccaacacggcatttgtaaatgtgagaaatgcgaatccaaggcctcctgctgctcctgttccttcctgctttgcatctgcctttgggaatttttctttcgccaatgctgcataatatcctagccactgatccatctgacagatcatctccggtgttgcacctttctgaggaccaaatactgcactgcatccctgttctccgcaaagagcatttgttacatcacatgcaatcttaaacttacactcttttaattccggaagcacataagtatctgtgatttcctccaaaaccttcaaaccctttgcaccaaatggaacctgatttccgtctttgtcaagaaaaccgtaacctaatgcttgaagcatcccgactcccccgtcatttgtcgcacttccgccgattccgacgagaaaacgtctgcatcccttatcaatcgcatcacgaattacttctcccacgccatatgttgttgtattcagcggatttctctcttcatcagaaaccaatgtaattcctgctgcccccgccatctcgatcacagctgtttttgtgctttcaatgataccatactcacagatcaccggtttgccaagtggtcctgtcacctgtactttctgtaatgttccattcattccggatacaagagcctctactgtaccttcccctccgtcagctaacggtcttacaatcacttctgcatccacatccactctttggattccctctgccgctgcctgtcctgcttccatagaagtcatacttcctttaaatgaatcaatcgctgttactattttcataatgaactcctttccatgtctgttccgtgttttattaatattaggataccaaatttcttgtttctcaaatatgttatatgtaacattatttcaaatttattctattattatttgttatatataacattttatagtaaaatggtaactgttcagagccaagcaaaatttcataaaacagatgtaaaatgcttgcatttttaagactgtttttgaaattttatttggcggatacgccacaccgacgaaatgcgtagcattttgaaggttggctctaaacagttatgtcaaaagaaaggatataataaaaattctatgataactaaaattgaccgcgaactcgcagaacaaatcgtaaatacaatcaaagatgtctgtgatcatgacatcaactttattgctccatctggtatcattctcgccagcacagactcatcccgtgtcggaacctttcacgagattggacaacaggccgctgcttccggttctgcactggaagtaacagaagacaacaatttttccggcacaaaacagggaatcaatcttccactttatcataatgaacatctgctggccgtcatcggaatcaccggtatacctgataaagtccgcagttatgcctatctcgcagaacgcatcaccaatcttctgatccgggagcaggaactaaatcagtacagccgcagacaggccgataaaaaacattttgtcattcaatctttgatcagaaacgaaactgacaatcaggaatacctcacctcctgtctacatgaatttaagattgatctcaacacaaagaaaagaattgttcttattcgcacaaataagcaaaatccaattacaaaccgctctattttagaacagaaaattcaacaaatgtttgcacaggcacatgtctgtcttcacacatttaattatccgggggattttattgctttgatcgaagaaactgattttgaaaaacagaattatatttttaaactctttgcaaaagaacatttcgatattttagatattgcagttggaaaaccgacatcactcttccagctccatacctcctatcaatctgctgaaactgctttgcacagccttataatttcatctgaacactatgttatttttgatgatttgacacttgaactgattctttctacgatcacaccagaaaatcagaaagaatttttagccaagacaatcgccccgctcaatgaacaagaactgcacctgctggaagtttatttttctgaagaaatgtcccttgccgccacaagtgaacgactctttctccataaaaatacattgcagtataaattgaatgcgattcaaaagaaatgttcactgaatccgaggaaatttcaggatgcggtgctgctttatctggctgggaagattaaataaccgtacaacttgattttagcaggggtaaaaatatacccctgcgcaatcttgcgctttcatctcggtaattgaattgccgaggattcccgcttattgtcctaaaataatggtttttgttttcggataggggaaatagcatatatcagggacattttgagtggttaaaggagaatctatttttagaggattctctccattggagtattctgcattatattcttttagtgacaaaaaattatcatctgttggttgtgcagagtatgttttgttataacttggaattgataggtaatcttgagaatttgtttttagaggattctctccattggagtattctgtattatattcttttagtgacaaaaaattattatccgttgggtgtgcagagtatgtttcgttataacttggaattgataggtaatcttgagagtctgtttcgtgtacatatgttgtcatggcagatgataaaagtaataaaaatgcggaaaataaacatataacctttttcatataatttcccctttcaataaaaaatttaatttgattttttatgatttccagtggaattacctctcttttaacaataaaatattgatttgcacaattaaaaactgtttatatatataataatagtagtattttctgtgaattgtcaatgggatttaatacattgaatctatcaaaaataatatcgcaaggggagaaagaatccctccattaaatctttattcctcctgttttactttctgccaacatgtgctataatcgtaaaagtatagttggattaaatttttaaggagtataaaattatgaaaatcattgtattagcaggaggcttaagcacagaacgtgacgtatcactttcttctgctgccggaatctgtcgtacattagttgaaaaagggcatgatgcattccttctggatgtattcatgggattagagaatgcgccggagaatttggaggatgtctttactcttccggatcacgggcttgagattgtgaagaatatcagcacggaggaaccggatcttgaagctgttaaggcttcccgtccggatcagtcagactgcttcttcggcccgaatgtaattgaactttgccgtctggctgacattactttcctcggtcttcacggtggagaaggagagaacggaaagcttcaggcatctttcgatctgcttggtattaaatatacaggacctgactctcttggatgtgcggttgcaatgcacaaaggtgttgcaaagcagattttccttgagtctggcgtagacactccgggaggtggaacgatttataagaactctgaagatcagtcttaccagtcactcggtctgacacttcctgttgttgttaaaccttgctccggtggttccagtatcggagtatatattgtaaatacagatgaagaatatgcagaggctctgaagaaatctttccattacgaagatgaacttgttgttgagccatacatcaaaggacgtgagtttgcatgcggtatcattgacggaacagcacttccgccaatcgagatcatcccgaagacaggattctttgattatgcgaataaatatcaggatggagccacttctgaggtatgcccggctgatattccggaagaagttgcagaacgcatgaaggaactcactgtaaaagcatttaatgctctgaagctcaatgtttacagccgtgcagacttcctgcttgacgcagagggtaatctgttctgcctggagatgaatacccttcctggaatgacttccgcaagccttcttccgaaggaagccaaggtttatggaatcgaatacggcgatctttgcgaactgatcattaagaagtccatggaggcaagatattaatgaaacatatgacattatctgaaattgcagatgcctgctgcggaatttattgcggtgatcctgcattcttagactgtgaggtctcaagtgttgcgatcgacagccgtaaagtagtaaaagatactcttttcgttgcgatcaaaggtgcccgtgttgacggacacagttttatcccgcaggtcatggaagcaggtgcactctgttccctctctgagcaggatcttggtgacgttgattatccttatatccgcgtttcatcctgcacagaagcattgaaagacttagctgaacactatcgccgttccctcgatatcaaagttgtaggtatcactggaagtgttggaaagacaagcacaaaagaaatgatcgcatctgtactttccgagaaatataatgtactgaaaacagaaggaaacttcaacaatgagattggacttcctctgaccgtattcaatatccgtgaggaacatgaggttgcagttcttgagatgggaatcagccactttggagatatgaaaccactggctaagattgcccgcccggatgtgtgcgtgatcactaatatcggatatgcacatcttgagaatcttggaacaagagacggaatcctaaaggaaaagagttccatgacagactacatgaatccgaaaggttctgttatcttcaacggggatgatgataagctaaaaagctacacttcccgtgatggaagaactccggtttatttcggtcttacagcttcctgtccgttccatgtggaaaatattgagcgtaaaggattaaaaggaacatacgcagaatttgttacaccgacatcacgtttccatgcacatatctcaatcccgggagatcatatgatttataacgctttagccggagttgctgtcggatatgcgcttggcatgaataatgatgagattgcacgcggaattgaaaagctcgttccgattgccggacgtaataacctgattgaagcaaagcattacacgatcattgatgactgctacaatgccaatccggcatctatgaagtcctctcttgacgtacttgcatatgcagatacaagaaaggtcgctattcttggcgatatgggggaacttggtgcagatgagcttgcgatgcaccgcgaagtcggagcatatgcagcatttaaaaacactgatgttttggtctgcatcggagcactttccaaagatatggcagaagctgcaaaggaaactgttcttgcaacagagaagaacatgaaagttttccattttgacacaaaagaagacttttaccagaacatgggacagattctcaatgaaaatgatacgattctggtcaaagcttcccactttatgaaattccctgagattgtgaagaaactgtccgaagaagcataagctgaaaccacactgaaaatatatgtcagtctttaaaaaagagttgaaacttctgcctggatcattctagctgattcaggcaaatggtttcaactctttttcagattctatcatcttattctacttttcactctatcccgagtgcttttcctaccatctggaactctccttcataaatgcagttcggcagggtaccctccacaatacccttcctgcattcttcgaaatccatccagatcacttcttccacttcagattcctgtaatttcaaatttttaatgtccactggttctctataaaggtatacggtactgcgttcattgtcacggaatggttttccatgaaattcagcttcaaactgtcctctgtgtgttccgataaactgaagctgatcttctcttgcatgaattccaagttcttctttcatctcacgcaatgcactttccatcagttcatccccggcactgacatgccctgcggaagaaatgtcatacgctcccgggttcgaatctttacattcacttcgtttctgaaggagtatatcataaccactctcccgattcggacgtacaatccagatgtgtaccgttgaatgcaatgttccatctctatgtgcaacaccgcgttctttcacctgtccggttttatttccatcttcatcaatcacatcaaaaagttccatcggctttccgttgagtgccacatactcaagcacatcagatttattatacacaagctttaaagagaaaaattcctcttcttcgtccatcagacggaagaaaattttgtctccctcccatagattcaggtcttttatcttttctttctccacccattcaagaatcccctcgtcacattcgattggattacctgtaaatccgtctgctgtatacagtgacatatattccactacatcttctccatatacaaatgtcacgattcctctgtatttccaagaagtcaatgtataaccggtctcctccttcacttcacgcagaaggcattcctccggactctctgcatattcaaaatgtccgccgacgccgatccatttatctttattcacatcatttttcttcactactctgtgaagcatcagatattttccgtctttttcaatataacataatgtgctttgtctgttcatcgtacttctcttttctttccactttctttatgtctgatgcaggtacacaattgcttaacctgcaacttttatccgcttgaacccaacaactatactgtagttactgttcacacagtgtgcgaccagtaactacagtataacatatttctttatgagctgaaccttaacttgtaaactgtacgcaactaaattataatgatgttatctatggaaacgatgcgttgctgattgcacgcatgtgaaccgcagcagcaattcaatgggggatattatttatgtggtcaagaaaagagctcaagaaaaaggcgcgtattttaataaaatcaaactattggcaaagtatatctgtctgctttctgattgcaatgctcacagcttcgtatccaatttcccgctctttatttttaaattattttcctgataagattcagacaaagacagcgcttattttacctgtttttatttctgctgaaagcttcagcagtgcatttctcgattttattcctgataatttcatagccgctgcctttttacatacggttcaaaattacctgaagcgtccggactttatcgtcacttcgtttcttacacttggggtcattctttctcttttatataagttttttatcagcaatcttttgattgtcggtgagaaacgtttttttgttgaatcttataactatgaagatacgaatatttctaaaatattctttttatataagttgcgttacctggcaaatccttcctgggtgatgttctgctacacgctttttcagaaactttgggatttaacaattatcggtggaattattaagcattatgaatatagcatgattccatatatcctcgcagagaatccaaaaatcagtcaaaagaatgccttttttctctctaaacagcttacaaggggaaataaatggaagctctttttgttagattgttctttcctcggctgggagcttttatctctctttacacttggaattctggacatcctttatgtccgcccgtacaaaatgaactgtaaagcatccttatatctgtttttacgaagaaactatgtgctttcaagagctcctaaatatgagcagctcaatgattcttatcttgagcatgttccttctgaagatgaacttctgatcagtaaagcactttatgacgattctgaaggtccttacacaaagatctcttattttgcaccgcatcagtatccggtatttcttttttccgtgcaaccacctattgccgcagtaaaatcaccggtcaatccggcgcagaattatgactttctgtcctgtgtatttttattccatgccttttctattttcggatggcttttggaaatcatttctgaactgctcagttgcggcacactggaaaatgtaacccttcgtacgcttccatggctcccgttgtacggaatctgtggtctgcttatactgttgctgttaaagaaatatatcaaaaaaccggctactatgtttattatcaactttattgtgtatacagttcttgattatctcatccagctgtttcttgatcttggttttggaattgagcttccgaaatatcattcttatcttgctttcatgaatggggaagcatatcttggtgatggggcagtatttgcacttcttggctgtgcatttttctattactttgctccgcgctggaacagtctcttcatgaaattaaagaaatggatgagaatttcaatttgtattcttttgacagcaatttttgtatttgaccttctatcaggcataatccaatattgattttactgctaaataatagtaaaatcttaattatcagtaaggttggttttactgttgtgattttttctaatacagtatgaacctgttccccctgacaaactattacagcttagaagaaagggaaatattatgaaaaaaagagtcgttgttgcactgggacaccgtgcacttggaactacacttccagaacagaaagtagccgttaaaagcactgccaaatgtatcgctgatctgatcgaagcaggctatcaggttgctatcacacacagtaatgctccgcaggttggtatgatccacactgcattgaatgaatttgcaaagaaccatccggaatatacagcatccccaatgtctgtatgtactgccatgagccagggatatatcggatatgaccttcagaacggaatccgtgaagagcttctcaaccgcggtatctaccgtacagtcagcacagtcctcactcaggtgatcgtagatccttatgatgatgctttctacacaccaacaaaggttctcggccgttatatgaacgctgaggaagcgaatgaagaacgtaagaaaggcaacttcgtagtggaagaacctggtaaaggtttccgccgtgctgtctctgctccgaatccggtcaagattgttgaactcgacgcagtgaaagctcttcttgatgcagatcagattgttatcgcagcaggtggcggcggtattccggtacttgagcaggataatcatttacgtggcgcaagtgctgttatcgagaaagacctcgcagccggaaagcttgcagaaggaattaatgctgatcttctcatcattcttacaaatgttgagaaagtatgtatcaaccttggcaaaccgaatgaggaaccactggatacaattactgttgatcaggcaaaaacttacatggaagagggacattttggaatttacaacatgcttccaaaattccgtgcagcagttgaattcgtagaaggacacgaaggccgcaaagcttacattacttcctttgataaagtctctgatgctctgaatggtaagaccggaacagtaatcgaatagattgacagattgaacttattagaaacataacctggaacaggccgtgatttcacattttaattttgtgaaatcacggcctgttttttactttccatcacagatttctttcatcctgtttttttgtggaataagatacttttaatttcaaaatatctcttgctttttcataaatatgtgctatagtatatatatctcttggatgtagtatcgaaaactacatgttattatatagatgtatcggaggtagattttatggaaaaaagactttatatcaaagaacctggaagcgcaattacacattttattggaatgatcatggcaattatcgctgcaataccacttctatacagagcagctcgtgaaccgagcaaactttatattgtatcgcttacaatttacgcagccagccttatcttgctttatgcggcaagtaccacttatcacacatttgatatttccgagaaagtgaatacggttttaaagaagatcgatcacatgatgatctccgttctgatcgccggaagctacacacctgtctgcctgctggtaatcggcggacgcaaaggtatcacactgctatgtattgtatgggcattcgcgattgtcggcatccttatcaaagccttctgggtattctgtccgaaatgggtatcttccgttttatacattggcatgggatggacttgcgtgcttgcattttctacaatccttgataatctgtcagctgctgctttcggatggcttttagccggtggtatcatctatactgttggcggtgtcatctacgcactgaagctcccgattttcaacagcaagcataagaatttcggaagccatgaaatctttcatctgttcgtaatgggcggaagcatctgtcactttatagtaatgtatacattccttctaccataaatataatttattgaaacgaaaagaagaaggctatcaactacgatttatactgttatcgtagttgatagccttcctttttcatttcgttactatttacatttcatgcgacctgcaacgtatctcactatctcgcatcataccttatcctacattgaaaactggctctcatacaggtgatgatagaaaccttccttcttcatcagtacttcatgatttccctgttcaatgatttttccatctttcattacgagaatcacatcagcctcacggatggttgacagacggtgtgcaacaatgaaagttgttcttccttccatcagttttgcaaatgcctgctgaatcttgatctccgttcttgtatcgatggatgatgttgcttcatcaagaatcaacatcggtggtctgcataacataactcttgcaatacaaagcagctgcttctgtccctgtgaaagcccgccaccatcttctgtgatccatgtatcatatccttttggcagacgacggatataattatggatatgagaagctttcgctgcctcgacaatctcttcttccgttgcatccggtcttcccatagcaatattttcacggattgtacccgtttttaaccaggtctcctgaagcaccattccgtaccctgcacgcagactttttcttgtcatttcgcgaatatctatatcttctactttaatacttcctgcattcacatcatagaaacgcatcagcagattgatcaaggttgtctttccacatccggtcggtccgacaatcgcaatacgctgtcctggctttacttccagattaaaatcttcaatcagatgctgacctggcagataagagaatgaaacatcctctactttcacatttccatcaatatccgtcagatgaactgcatgttccggttccggtatctgcggttcttcatcaatcaatgtaaatactctctgcgcacatgcaatcgcattctgaaattctgtcacaactccggaaatctcattaaatggctttgtgtactgatttgcatagctcaagaaactggacaattgtcctacgctcattgcaccgcgtacaactgcaaatgctccggtaattccaactcctgtataaaccagactgttaacaaatcgtgtcgccgggttcgtgatggatgagaaaaatgttgcccgcaaggatgcctcctgcaatcttttattcacttcgtcgaaacgctctgttgcatcttctccgcgcccaaatgcctgaaccactttctggtttccgatcatttcatcaatcaatcctgtctgctctccacgtatttcagattgcaggcggaacatacgaaatgttctctttgcaataaaatttgctacaaagaatgataccggtgtgataagaaccacaacaaatgtaatcgatacatttacggataacataaaacaaaatgttccgataatcgttgcaataccggtaaaaagctgtgtaaatcccatcagtagtccatctgaaaactggtcaacatccgcaattacacggcttacaacttcaccatacggatgtccatcaatatatttcaacggtagctgctctattttatcaaatgcttcatttctgatatcctgaaccatctgataggtcatcttgttattacacacattcatcagccactgtgccaatgccgtgatcagtgtgcacacaccaatctgaatcatcacctgaattactcccggaaaattcactttgccttttccgatcacataatcaactgcatgtcctgtcagctttggaatatataatgtaagcgcaacggacacagtcgcaagcagaattgaaaatacgagaaaaattctgtatcttccaagtcggcagattacttctttcaatgttgctgcctgacttttctgttttttctcactatttgtctttcttttatcagccattgattaccgcctcctttggaaattgtgaataatagatttcctgatagattggacaatccttcaacagttcttcatgtgttccgattcccgccattgctccatcatccaacacaatgatctggtctgcatgctgaatagatgctgctctctgagatacgataaatacggtcggctggtttttcatctctttgatcgacttgcgaagtgccgcatctgtagcaaaatccaacgctgatgcactgtcatcaagaatcaggatctccggtttccgaaccagtgcgcgcgcaatcgtcattctctgtttctgacctccggaaagatttcttcccccctgttcaatctgaaattctaatccaccttgtttcgtatcaacaaattctcttgcctgagaaatgtccaatgcttcatacatttcctgctctgttgcatcttcctttccccagcggagattgtccgcaatactccctttgaaaagcactgctttctgaagaacgacaccgatatgttctcttaggttctctgtctgatattctttgatatcacgtccattgatcttcactgtaccgtctgttgcatcataaaatctcggaatcagattcacaagagacgattttcctgaacctgttcccccgatgattcctatcgtctgtcctttcttggcgcagaaatttatatcagataaggatgtatctgaagctcctttataggtcaaagatacgtgagagaattctacgaccggaattttatttttcaaatcccaatctgtttcggaagaattgctcttccatcttacatctccctcattcatatctggtttcacagcaagcacactctccacacggttcagacatgctgctgccttcgtcacggaaatgatcaagttcgctaacttcacaagttcaacaagaatctgtgacatataattaataagtgccacaacctgtccctgggtcagatctccgatatcaacacggactgcaccgacatagatcaatgctatgattgctccgtttacaataatatatgtcagcggattcatcattccggaaatgcgtcccacatatttctgcgcatctgtaagaatttgattcgcattttcaaaccgcttcgtctcatcctcttctttattgaatgcacggataactcttgctcctgtcagattttccctcgttgcaagaagtacctgatctagatctgcctgcactttcttatacatcggcatcgtcacaagcatgattccaaacacaataagtgaaagaagcggaatcgtcacaacaaatacaagtgctgctttcacatctactgtaaatgccatgatcattgcaccaaatacaatgaacggcgaacgcaggaacaatcgtaaaacaagattcacacctgactggatctgattgatatcacttgtcattcgtgtgatcaatgtagatgttcctaattggtccatttccgtaaatgtaaatttctggatatgttcaaataatccatgtcttattcccgttccgactcctgttgctgccttcgctgcaaaatactgtgctgtaatggaacagacaagtccgatgattcccagcgcgatcagtacaaaacacattttcacaatatatagcttatcctgatttgcaattcccacatcaataattgccgccattaccaacggaacaaacaactcaaaagatgcttccagcatcttgaacaacggagcaagtatggattcttttttataatctttcagatatgcaagtaatgtcttcataatgtgctctttcctttctcttattttaattaaagagagcctgtcaaaatgacagactctcttatatcattattatagactatctatccaatccgattctctctacctgtcttccgatacgcattgcttttgcatatgccatgagacgttcttcattcttcttatcgtactttctgtagttctcaataacaagttcaaagatatctttatcaatgtcttcacggaaacggatgcagtcgcacacgcttctgtcaattccatatacattgtaagaaccgtactttgtatcaaacacatgcttctcatcctcaaaagcctgctctgagaagtaatgtctgctgacttcaaaattcatcttcatcttgtgacggtcacttcttcttgttgcaattgaaagaatctccggctctttatcaatcaggcccatgtaatagcatgcactgtctgcgcagattaccgcttttctatttactcgtgccacttccactgccttataatcttccggtttggaaaactccggactaatgatccaataatgtccatgtgctaccttctcaagctttccttctgctgtcaacagaccaatctgacgatttgtaagtccttccttcatcaaatcttccgtatcaatatatcctttgtatttgtctgcaatgtatttcactttatcatagataatctgacgcataattcttttcctcgcttaactcgtgtattactagaaactgtaagaaatgtttacgggctgctgtgatcagcaacacctgtgattcttttaagtctttcgtattgtatcatctatcaaagcggttgacaataggtaagacgctgatttttcagtccgatacttctatctcttttattaaaaattcattcccacgaagcagataggtattttcacttccacagtacggacagattttcccatgttctaccgttggatattctttctggcattcttcacaaaatgttactgcttctatctgctcgattttcagttcggcttcttccataagcggttctttcttcttcgcccaattccagcaatccgtcagataatcatgtagtattcctgacacttccccaatctccagtgtcacggcagaaaccttctccacatgattttcctccgcaaccttctttacatcttttacaacataaaagacaacacctaattcgtgcattttccttccctctcaatttatatttttgcaactatatcctgaagtaatctgatcagttcttttgcgttcacaggtttaaagatacactcattcattccggctgacttacactgatgtatactttcggtagacgcctgtgctgtcattgccaaaatcggaatctcggctgcatcttccctttggtctgccatagagcggatctttcgtgatgcctcttttccatccaactccggcatcatgatatccataagaacagcatcatattctcttagccccgactgtttaaatagttccgcagcttcccgtccattccatgcctttgtcacctgtgcaccagcttcttccagataaaactctgcaatctccatattgatctcattatcttcggcaagaagaatatgatatcctctgagcggtttatcctctttcagatcctgttttgttctctgcacacattcttcattctggctttccttttccggctgaactactggaaaactcaaataaaaacggaactccgttccaacgccgggcgtactgctcacccgaattgttccacccatcttttcgaccagtccttttacaattgacattcccagccccgttcctttatactgcgttcttgcatcatttatttcctgtgtaaaaggcttaaacaattcttcttttatatattccctgctcatcccgacacctgtatccgtaatacgaaattcgaatgccgcacacattccatcaaaagaaagttcttttacataagtgtctatccttcctccacgcttattatatttgattgcattactgaacagattcagcataattcttctgatctgcagcgtatctccgctcagcatcgtatgattcaccttttcccgatggctctcatagctgatttccattgcctctacctgtgcactgaccacaacttctacctgatctatcaacgtattcagatcaaacgtatcattctgcaactctaaatatcctgactctattttactcatatcaagtacatcattgaccagttcactcagatgttggacagacagatccattttatcaacacactcttctatcttttcctgatccttatagttcttacggatcatctggatcattccgagaataccattgatcggtgtacggatatcatgactcatccgattcatgaattctgtcttcgcacggctctcgagatccgctttttcgtatgcaacctgcagacgttctctttctctgtcttcctgctcatggaactctgaaatatccttgaacaaaataattgcaccgatcacagtacttgtctgcttcgtcttactttcataaaccatctcctgtgacatcaggactgtctcctgccaccagcatctgcttccatcactttgctctacctgatattccacagtcacctgcttttcgcctgctttaaaacgttcgatcagctgtgccggattttctgtgatacgataattttctctcgtctcttttgtcacgaaccgttgataggtcttacaatacgtatcataaggacatggaagttttatgtctggaatctgcctgttttccctgttttgccaaaatatcttttctaataaattctgtgtcagattaacactttggattatttctgctgtatccatcaatgcttctatatagtttccgttttccaaaatggactgcgtcagctgttcatagaactgtgttagttgctttttctcatttacgatcaatctgtccctgtcctgataaacatcaaacccaacaagaaaatgatgcagatttccattttcagcaaagtcaggcagtaaaagtgtgatccggccacgcaaaactctgtcaccatctttgtgacaataaaaatattcctctacctgatgttcctctgtcagtgtttcccggatttccgacagctgaagtttcttccagagttccctgcggttctcttcctccgccagctcctgtataatctgctctactgcaccagaataactaccatcatctgcaaggaaaaattctgagcttgcacgaagaacaacatactgatccacaatcgcatcacagtacagacaatctgtaaaatgaaatcctttttcttttacagattgtaacagccgactcctaattctccgcttgtcagctgcttctttcatcttcgcccgattcttgtctacatacatgttcttatccgcatatcggaacaggtctttcatattacttcccggaaaatctgtagacaatgcatatcccactgcatagctaagtagcatatccggatgattctttgaataacgctccgtctgttcccgtatcatctgcagacagtctttcacctgcttatgatccacctgctttaacactgcaataaactcgtctccaccgtctcttccgacaaaatatttctccggaagtgctgcccgcaattgttctgcaaatgatctgatatattgatcgcctctttcatgtccctgccggtcattaatgattctcagattatttaaatcaaacaccattaccgctgttgattccctatccgtaagcggctcttcagatgccagaatctcctcgcacttattcttattcggaagtcctgttgcctcatccagataaaccttctgacgaagcacacggttttgcgccgcgtaccgtaatgccttgaaaagctcatatcccaacagacacacaattccaataatatccacgacaacgattttctccagacgatttaaggaagatgccagcttctgcgaataactttccgcaagccctgttgtctcatcacagattgtaaaaaatgtttcacttttatttataatctgtgtattctcatatccttcttctcgagccttatagatttcttcctttagttgttcaaaaaattgttcctgcacttccatcttatcctgaaatgctttatcatccagacggacaaggttcagttcatcgctgccataacgtaacccatcaatatacgcatccacttccctgatcatttcatcctgtggtctctgtgcattttccagtttgatgatctgctgcgtctttccacgcacaagtccggcataattcactacacgagccgtcccttgcatatcgctgaccaatatcataattccaaagaataatgcaatcaggatacagataagaagcatcatgaaaatacgcagaatccgtgtgattttcttttctttttctttcatatctttataaccttacttttactttatttaaagattataacagaatctcctttgttttcccataataaaatacatcaccagaggctttttaaaaatggtgtaatacttgctatctgttttggaaaatgtgatactataaattatagtcacacttaattttcgtaacaaacggagggaccctctatgataaaccagacaaaacaaatattggaagaatctctgaaagaattaatgcttcaaaagccgctcgataagataaccatccgcgatttaaccgaagactgcggcatcagccgtatggctttctactatcactttaaagatatttatgatctggtcgaatggtcctgcctggaagatgcaacccgcgctcttgccggcaaaaaaacttacgacacctggtctgaaggactggtacagatttttgatgctgtgtatgaaaataagccatttatattaaatgcttaccgctgcatcagccgggatcaaattgaaagtttcctttttcatctaacttccgatttactgatgaatgttgtagaggaaaaagcagaaggcaccagtatttctgaagaagaccggcgctttattgccgatttttataaatacagctttgtcggtcttatgctcgactggatcaaacagggaatgaaagacgattatgtcgatctggcacataagatcagtattaccatccacggaagccttacgcattcaattgaaaattttgtagcacttcctaaaaaagaaaattcataacacaaatatactaaacctatactttacaaaaagaggcaaatgataagttttttatcacttgcctctttttgtaaattgaaaatctttaaaaatgtccatactataactataacaactatacttcatatctcgttatttagagtaattatgatgagatgatctcaaaacgagacatgaatccgttttttcagaaaggtggttttattatgtcaaataagaaatctaaacttggtgtaatctctgcagtagcagcaggaacaggaactgcaatttatctcgcacagaaggccaaaaaagaatctggtaattcagaatccggtaattctatttttaagaagagtactgttgctgattcttccgttccagataactatcgtaacacggagcgcggaaaatatgaccgcaacagcaaaggcatctattattccaacggaaactacgaagcatttgcacatccggagaaaccggaaggtgtagatcagaaaaatgcttacatcgtaggaagcggacttgcctctctggcagcggcatgtttccttgtccgtgatgcacagatgcctggatgccagatccacattttagaagcaatggatattgccggtggtgcatgtgatggaatctatgatacttcccgaggttatgtaatgcgcggtggacgtgagatggaaaatcattttgaatgtctgtgggatctcttccgcagcattccatccatcgagacacctggtgtttctgtacttgatgaatattactggctcaataaacatgacccgaactattccctttgccgtgcaactgtaaatcgtggcaaagacgcacatacagacggaaaattcaacctcagtcagaagggctgtatggaaatcatgaaactcttcatgacaaaagacgaagatctctacgataaaactatcgaagatgtttttgacgaagaagtatttgattctactttctggctctattggagaacaatgtttgcatttgaaaactggcacagtgctttggaaatgaaattatatttccagagatttatccaccatattgccggactgcctgatttcagtgcattgaaatttaccaaatataatcagtatgaatccctcattcttccgatgcagagatacctcgaagatgccggtgtggacttccagttcaatacagaagtcacaaatgttgtattcaaattcgaaggagacaaaaagattgcatctgtaattgaatgtaaagtaaacggacaggaaagaggtatcgtcctgacagaaaatgacctcgtatttgtcacaaacggaagctgtacagagggaaccatttacggagatcagaaccatgcaccaaacggggatgccgaagtccgtacaagcggtgtatggaacctttggaaaaacattgcccgtcaggatccatccttcggacatccggaaaaattctgttccgacatttccaagacaaactgggaatctgcaacagttacaactctggatgacaagatcattccttatatcacagacatttgcaaacgtgaccctcgcaccggaaatgttgtaaccggcggtatcgtcagctgccaggattccagctggctgttaagctggacgatcaatcgtcagggacagttcaaagaccaggataaagataaggtatgtgtctgggtttatggattatttactgatgtgcctggtgactatatcaagaagcctatgaaagactgtaccggaaaagaaatcacagcagaatggctctatcaccttggtgttccggaagatcagatcatggatctggcagaaaacagtgcaatctgtgtacctacaatgatgccttacatcacagcattcttcatgccacgtacaaaaggtgaccgcccggatgttatcccggatggatgtgtcaacttcgctttcctcggacagtttgctgaaactccaagagatactgttttcacaacagagtattctgtacgtactgctatggaagccgtttatggacttctcaaagtagaccgtggtgtgcctgaagtatggggaagtgtttatgatatccgcgagcttctcgacagctctgtaaaacttatggacggaaaatctccacttgagatccagctacctggaccgctgaacgcactgaagaaacctcttctgaagctcgtaaaaggaaatgtgattgaaaaggtactgcgtgatcacaatgtactgaaggacggaatgtaaaaaagaacacttgttcttttttctgaaatatgctattctatttctacctgatcacgtaagaagaatgcctccccgcattcttcttacttaaatgatttgatacaagggtcaaaaggtcatgcgtttcttgcttgcatgaaaaagcatgacttattgacccgcaaaacaccgaaaagtagccatttttcgtagaaaaatgagcggatttgaggtgttttaggattgcgagagcatgaaatgcgaagcaatccgtgtatcataggggtcaaaataccttttgaccccaacatcatgatttcagacagcatataggagaagcagcaacacatggatggatatcagttcgaagaacagtgtgcgatcatactaaaaagaaaacatttttcaaaaatagaagttactaaaagttctggggatcaaggcgttgacatcattgcctgtaaacacagaaaaaaatacgggatacagtgtaagtattacacgtatcccgttggtaacaaagcggtccaggaagcttatgccggtgcgaatttttatgactgtgacaaggtcatcgtaatgacaaacacaacattcacccgctccgcgattgaacttgctgaaaaactggatgtagaattgtggccggattgcccggtcacacctttttacagtttattgttcaagatcatgggattattgaacctgcttcttttcctttacgcgatcctgacacttttttctgcaaaatatgattttattcatttgccggttccacttgatacgatatcgctggtggcactcctgacagcctctgctttaggaatcttcggctggaagtatctcctttgtaatctgattaccgccggagctttcctcttccttgcattccatgttgtgctttcacctgtatctctggcaacagattatacatacacacaactgctctccttaattcctgcagttgtatacatgcttcatgccgggtggctgaaattaaagaagataaaaaaataaaagcttattcaaaccagatttccggattcgtagacgatacactggtcactcctgccttaagaagtgccattacatcttccttctcccggatcattcctccggcgatcacaggtaccggaagatctttacagatattttcgatcaccttcggcatcattcccggaagaacctctaccacatccggctttgctgccgttacctgtgttttcacattttcataagccatagaatcaatcaaaaatacgcgcaataccgtgagcattccaagttccttcgctcgatgaatgatcgtcggttttgtggaaattacaccatccgcttctgtatattttttgataaaatctgctgcaatgttcttcgatgccagcccatggatcaagtctagatgtactaccgccagttttcctgctgcttttactttagaaacaatctccggaattgtacagatgtctccatataaaataaatacaacctggctttcacttttcagacaggcatctactccttcatcatcttttaccgctgcaatcacaggggatacctccaacgcatccaggaatttataattcatttcaattctcctttgttccgccaagatcaaatgaatgccagacacagaaactgtgaacaacagtacttgtatctggcatctgtttcataaattatactatatctccttcacaatcgtctagtgtactgcatccacatttccggcagctacgatatttacacctgtacctgccacattttccaacacaatatctccaatgtgaaccggagctttgatcgttacgccgcgaagtgctgcgatacagtcaaaaatcttatcttttgaaatgtcatgctctgtcttcacattgatcattggtacttttccgtctgcgacacgaactgtagtcgttacaatacgcgttggatcagttacttcctttcttgcatacgtctctccacgtggacaagtatttcctgtaacggatacaacttttccgtcttccatttttacaacgatcggacatcccatcgggcatccgatacagattaattctctctcacccattttcttatgcctcctcgatccgaatcatgatcttctttgtctccgggtattcttccagtttctttttcttcaggattacctgctccatctcacccggcgccattacctgacgtttcttcttaccaatcagctgatcgtcaaaatacactgcaatcgccttattcttatatacatctccgacacggaaacgaactgtcagattttcttccatttcagaaggtcttacaaaggatggtactgtgtagcgcactccgccttccggagaaatcggaagcatttctgcctgcacatccttttctcctgcctttatataagcggctgcattctttccagcagtcgctgcctcctgagatacaaaatccacaagatcatgcacatgcaatacatttccacatgcgaagatgccgtccacacttgtttccagtgaatcgtttacgaccggacctgaagtaacctgtgaaagttctactcctgcgctttttgaaagctcattttccggaaggagtccacaggaaagaagcaacgtatcacaagtatatctttcctctgttccaggaatcggcttgcgatcccgtccgacttctgcgattgtcacagcttccacacgatgctttccttctatatcaatcactgtatgactcagcttcagcggaatctcaaagtcatccagacactgtacgatatttctcttcaaaccaccggaataaggcatcagctctgcaaccactttaaccttcgccccttcgagtgtcatacgtcttgccataatcagaccgatatctccagatccaaggatcacaacttcttttcccggcataagcccttccatatttacaagatgctgtgccgttccggcagaataaattccagccggacgataccccggaatattcagtgctcctctagaacgctctctgcatcccatcgccaggataattgcatttgcctgaagaagcagaattccatcctcgcggtttgtggcggttactaccttttccggagaaatgtccatgaccattgtatttaatttatattcaataccacgttcttctacctgctcaataaaacgtgctgcatactcaggtcctgtcagttcttctttaaatgtatgcaaaccgaatccattatgaatacactgctgcaaaatgcctccgagacttttatctctttccaaaatcaaaatgttgtcaattccgttatcttttgctgcgactgctgccgcaagtcctgcaggacctccaccaattatgattaaatcatatgttttcattttactcatcctccagttctttattttcacctacgataaattccgatccaacgccatttttgccaatcttatcaaccggcatcggaacttctctttccagaatctccataaccttcggggaacagaatcctgactggcaacgccccatgcctgctcttgtcctgcgcttcactccatccagagagcgtgcaccaagcggacggtgaattgcatccaggatttctccttctgtgatcatctcacagcggcagataatatttccataagccggattttctttgatcagctgatttctctcttccagagaaagcgtatccggatctaaaatcccatgtctcaccggattaaaatcagacttttcttctgcattcaaaaggtctcttacaagttctgcaaccgtaacaccgattgccggtgctgaagaaagtcccggagattcaatgcctgctgcattgatcagtccttttacatccgctgattcaccaattacaaaatcatctccatcctcgtgtgcacgaagacctgcaaaagaagtaatcacctgacgaagcggaacattcttaacgctatgagaggaaactcttgcgatctgatccagaccatccattgtcgtgtttacagcacctttatcttctacatttactgctgtaggacctacaagcagattaccgtgaactgtcggtgtgaccagtactccctttcccattttcgacggaagctggaagattgtactcttcacataatctccaactgtcttatccaaaagcatgtattcccctttacgggctgtgatatgaagctttctgtctgaaagctgattattgatctcatcagcataaactcccgctgcattaataataagttttgtctcgattgtctcatcaacacaggtatctgcgtgatgaacctgaactctaaatccttctcctgtctttttcagtttttcaacttttgtattcaggaaaaaccgaacaccgttctcgtatgcattttccgcatatcccattgtcatatggaacggacagacaattcctccggtaggcgcccacaacgcacatgtcacatcatctgccaggttcggctctttctcaatcagagcctctctgtctaaaatctgaagtccaggaactccatttttcttacctctctccattaaaacctgaagtccttccggatcctgctctttcgtacatacgaccaaagagccgtttctcttaaatggaatgtcaagctcttctgcgattctgtccatcatcgcatttcccatcacatttaactttgccttcatcgttcccggaactgcatcaaatcccgcatggatgatcgcactgtttgccttggatgtctcattacagacatcctcttccttttcaatcacacacgtattcaacttatatctggaaacctctctggcaatcgcgctgcctgtcactcctgcaccaataataacaacatcaaacatatccatccctctcctttatcacacaaaaaaagcaaggcaaataaaacgactgcctgtcgtttcatctaccttgctcaaatctctggtatctaatattcgttttttctttattctagcacatttttcagaagaatcaatcctctttctgtacaatgtgaaaatatttagttcacatttgatggataaatctctgtaatggtcggtgccatccacgtttccagggcgtccatatcaggcgtatagatacgcataaacagatggaaacctccagcgcccacaggaagccagtttatggtgttctgtggggcatcttcagacagaataacatcaacggaaccatcatcatttgcctgtaaaccggaacggtcatttatgcagtaacgattaataggattatcaatcaggaaatcatcgtccccatatgcagtcacagaccagaatcccccttcaagaacctgcggatagctttcgaaatgaagaatatatgatttttctcctgtgagagtatttccatccgcatcctgctctatctttggatacagcgcaacttcaactgtattagcaccaagccctgcaagagctaccagtgcacgataagcgtattctgtattgaaatctccgatcggttcaccaaaataatcccactgaccaagcttttttgaaaatttctggccctctttgataagctttagctgaatttctgtcagcattgtcttccagttttctgcaacatcaccggtaagaacagaaatgtcaaattccataccaggacctatattcacagctgctattttttcaagcatttccttatctgcagctgtcggagaattctttaccatcaactcattggccttattaaaaaatgtgatcggatccatggaaaggaccttatcaacaggaatataatcattctcttcgctgtagcttcccctcggaggttcataagtgtctccggatatataatcggaaagcggcataagtttcatttttccttggatggcatacacatttggaagatcctcttctcctgataaaacgattctggtaatggaccatgccatagatgtaggaacatctatacgggtaactccctcaggcagtttcccttcccacgtagaaagagtaattgcatatgcaccagccttatcaagaaccgcagcagtatttgtccatccatccagtacctgaaccttacaaaaacgatctgtttttggaagttcatagaccatcggctcctcgctcagatcataccagacctgtgaatagatcgtatccacattaggagtcaccacagtcctgaattgtgcatctgccagtgcaacactgtgtataaactgatttacaggtgcttttttgttaacaacttcctctgtgttcgttgccgaggtctcagtcgcatccatgagcaccagcggaaatgcataaacataagcatcttccactgtctcccatatattttcatctgtctcactgtcaacagatgctgcaaatcttttcatattcatatcctcctgcttccgccccaaaactttatggttcaataatattaaaatatttatactctgacgtaacagtaaccgcatccatcaatcgtgtcaggcaggtctcatcaccctcctgttcgatcaaagcagcaacattctctgcgtttttctgaacagcatctgtatcaccgaaatattctaccagcttttgggcataatccgatggtgtaagttcagcaagatggacaggattagcgtcataccagcccatatttggtcgcattctcaaactccgcagtatcttcaaaatccagcaatgcataaacttcctgatttgcatcaatcgtatactgggtagccggtttgctttccgctgttaattccgatactgaaattgcggttgaactggccacagccagtcatggtaaatgccaatgcagcgacaatcaaagtaattacttttttcttttcatgatgtcatgccccctttgttctgttctttttcaaacctgaattagcttttgtttttattttaacacaagcacacttaagcaacaatatctttatgaatttaaagcaagtaaacacatgcaaattttagatatttttcaatatattaatttaagttcaaaataatcatctatcatcaagagcttaaagttgattttgaaaagttttattgtattttgaagaaatttgtgaatattacaaaaggtattcttcttcgaaaatcacagattgtaaatatttcagatgaaaacatttaactttcacataccagggatgctttgaacaatacacaacctcccataccccaacttcccattcggccacctctcatacccgggaatctgtctcgcccctctccgcaaatatgctttcactttctctccatacagatacggatcatttcctttcacaatcccccactccatcaaaagtgccgcgcttcctgtaacgaatggcgttgcaaatgaagttcctgtgaactctgcatatcctccacctgctacctgagccattaccctcacacccggagctgccagatcaggtttgttcgcattttccccctcatatatctgtgtcggtcctcgtccggagaagtctgcataagaaaaggtcaatgcattatacgctgccacagtaataacaagagatgcagtagaaggtatcgtaagtgttgtggaactgtctggctttaaaaatgcagtgccgatattaagtgcattctgtaccggaagccacatttgccacaacttatccacaacctgtcctggcatcatctgtattttccacactccggctgtgacaaattcatttcgtggtagaaaactaatataaatttcctgacgaatactatatggttttggctctccataataaaccaggagttctgtttcaccaatctgtattctttgtgttccttctttttcttccagtctgccggaatgatttccggatggatcgacaattgtaattgcgacttcatcgacataggatttccaaatttgcagactgaatgacttctccctctgctgtactgcaagttgaacttctgtcatcattccttttctatattcacctgccgcatgtcccgcagtcgttccttcatttccacttcctacacaaatcacattcttccaacgttcagatactgtattcaaatatctttccaaaagacttgttccatcatgggaaccatatgtattcccaaaactgatattgatcgccaccggcttttttaactcttccgcttttcgtacgatataatccacacctcgcatcagctgggtagttcttgggaatcctgttttccctgctccccccatctttacaatcagcagtcctgcttcgggtgcagctccccgatattttccattcttactaccccttccatttccagccgcaatcccggctactgctgttccatgtccactggtatcacgacttggtactatgcgatacctttcttccctgacttccatgcgtagtgcttcatttatctgttctgaagtgaactctgttccgatatgatatccttgcggcggtttaccgttttgtaacgtctgatcccataaagcaagaattcttgtcgttccatctgcatttctaaaatcgggattttcataatcaatcccactgtctacaattccgatcaatacgtcctttcccagcagtggaaatgactgttttttctgctgattatcctctaaaccctcttgcccaatcgaagaaaaaaaaggcgcagcctgtacttcatcaatacaggacacacgccttccattctctatttgaaaatataaacttttcggtttttctataaattctacttctggaaatgctgccagttcttttatctgactttcttttatttggataatggcatatccacctgtcagttccgtcacataaacagctcgtgttcttactcgctctaacgtcccggaatacttcacgatcaattcccattctttttcttccagatcatatccgatatccagactctcgcttttctgacgttcttcttctgtgatacttaatgcaagattcaattgattttctattttctggctcacgaaggctgcaccttacttcatctcttatttctatgttttatgaagtaatttagcagattattccattttcatctctaagacaaccacctcacagcttttcagattcagcctgttctttgtataatctactgtctcgttcttctggttcgacattaatactcttttcacattccccttcaattcaatgcttgctgcgtctgttccgaaattagccacgacaagaatactggttgctgcgtctgttctataaaatgccaggatatcatccatttcttcatattccggaatgaattctccataagtaaatacatttttaaattcatctgatttgcgcagtgctactaactttcgataataattcagaacagaatccggattgttttcctgatcttcgacattgatctctttgtaatcaggatttatctttaaccatgccgttccttttgtaaacccggcattctccccgcttgtccattgcattggtgttctcgcattgtcacggctcatccgattacaagcttccattgcttcccggtcagataatccagcttcacgggcaatctgatactggtcttttgtactgatatcatcgaattcgtcaatgctgttccacttcgcatttttcatgcctatttcctgtccctgataaatgaaaggaattcctctgagaagaagattaaccgtaccaagcatcttcgttcccgccggtgtctgggcataagctggaagaaatcttgacacacctctcggttcgtcatgattctctataatatttgctttaaatccatacttctgtgtttccatctgagactggaagattgcttttctccatttaggaaattccatcttcggagcatcataccatccatgttctccatcactgagacaatgtgcactaaagtcaaatattgttgagaaatgtccattttctccaataaattccggtaattcatccgctttcatattgaagacctctcccactgtaaatgcatcgtatttttggaatgtatttttctttaagtcttccagaagttctcccacaccatctacactttcaaccattttccagcagccggccatgccatctgccccatccggttcaaaatcaggaaatttcagatctttcttgatattaatgatcgcatcgattcgaaaaccggaaagtcccttttccagccaccagttgatcatatcatagagtttctgtcttaatttcggattctcccagttcagatccggctgttcctttgcgaacatatgaaaataatatttatcagttcccggcaccggttcccagcagcttccgccaaaataagaacgataattactcggtggatttccattctttccttctcggaaatagaagtaatccgcatattctccttccggatccgctaatgctttctgaaaccattcatgtttgtcagaacaatgattaattaccagatccatgataatatgcatgtctcgctttttcgcttccgccagcaattcatcaaattcttccatcgttccaaattcttctgcgattgcataataatctgcaatgtcatagccctgatctacaaatggtgatttatagattggtgataaccatataatatcaattccaagcttttttaaataatccagtttcgatatgatacctctcaaatctccgattccatctccatttgtatcaagaaaactcttcggatatatctgatatgctaccttgtcatgccaccactttttttccatattatcaacctctttcacatcattttatcttccacataatattgcgtcacgatcccataagctttcgtattgccagatcccatcgcctgtattatactgctattatatgattatatttgcatgaattcttgcattattttttcattgtataacacaatactgctattttaggaggggactcgtatgaacgttccacattcactcatattagagcaaaaagaaaatacaaaacatggagaagtattctttccgatccaaaaatatattacaaaacttaacttaaattccccggtcattatgactcactggcacgaagaagcggaactcactttgatgacaaaaggttcctgtatttatcaaattgatttagttgactatgaagtaaatgaaggtgatctgttattcattccaccactgcttttacattcaatccgcctgaatggaactgatgatttctgctcagaaacctatgtgtttcatgttaactttttagggggaaatgcaacagatatatgctccacccgttatcttacacctatgataaatcatgaattgaccttgccttatcatatttcatccacacaccctgcacatcattctcttcatgaatgctttataaaaatggcttcactctatacggaacaaacatttggatatgaaattgccctgaaatcagtcctattgcaggcactgtttctcctacttcaatatagcaccacggagtctgcaactatttctgcttcttcagataagctgaaaaatgtactcgattatatcgatctccactatgctgagcctctcacaatttctgaacttgcagagctttgctatttcagtgaatatcattttatgcgttttttcaaaaagcatatgaacatgacctgcatccaatatattaataatgtccggctcgaaaaagcagtggaattatttgaacatggagaaacttccatcctggaagtctcactctccgttggctttcataatctttcttattttcacagagcctttaaagtcaaatatcacatgacaccattatcttttatcaaaagactgaattaatgttttgctttaagaaaagcagcggccgaaacttccattttcagccgctgctcttataaattcaatcttctattttttctttcttcgtctcttcttgattaactttcgaatcaatactaccaacagaataatgatcagaataagaaccagaacgataccaacgatcatcactgaaaacttattcggattcttcacaagatcgatcacatttctgatttcatctacaactttacgtccatgtgtcgtctcataatactccggcacatttgaaatgccgttgccatctgtatcatcaaaagacttcatatatcttgcgatcgcatcccatgctttcagctccttatcgccttccatgattgcctgatcttccagattctcgatcggattaccatccttatccttcggctcgatcttcaacagaccataagacatttccattacagagccaagcatctgtccggtataaagatccgtcacaactcggtataactggtcatcctggatctcgattcgctctccatcttctcttgtcagataacagtctgttactttattcaagatcattcgatgcggattgaatgtgaaattcagcccgctgcaatataatcttgcagttgtcataaaatcggaaaccgaagcgtctacttctgctgccagtttcaattctttaccagtcagataaacatcaatcagcggatatcctgccaatccgtcttttcctattccaagtgaaaatgaattatatacatcttctacagtgatatttcctttcgtatatgtgtcgcgcacacagccacttggaacaacagctacatccaccggggttccattatagtcttctgaatgctctacagaatagatatacgaatcagacataatatctccaagattcagttcttcatgcttcgtctccatttcttcgagactgttgaattcgacatcattctcggcaagaacttcatctcttgtatatccgaaattcgtcaggtaattagtatctactgtatccatcagcgcatcgatccgctcttgtgtcgcctgatccggctcaatatcttcagataccggaatcaactcgtaggaagttatctcccaacgaccatcctgtttctgtgtcatggaaagtgatccaagatttcttgcgtattctccacaggatacaatgtaagtatttccgtgctgaataggctcttttaactcggtatgtgtatgtccgctgatgatcagatcaagatccggtacttcctttgcaaggatctcatcttctgattttttctcgtcctcccaggttccgctgtgagacacacaggcaatcatatctaccttttcattcttcttaatctcttctaccgttttcttaactgactcaaccggatctttaaataataattcacaggtcggtgcacatttcagagcatctactccaaacacgcccactacggcgatttttacatcatctttctgaacaaccacataatcctttacgccatagttttcaaatgctgactggatctgtttttgcccttcacttaatccgttcatttccatgctgtcccagtctacattgcacacaacaagactcggtaccgtctcgccggaatccttcgccgctgtcagcatgtctgccagtcccttggaacgataatcaaattcatgatttccaaaggttgacacatcgcatccgagatatcccagcatcctaagttccgctgcctccgtgtcataaactgtctgaatcagcgtccccattgaaaaatcaccgccgtccagtatcagtgtatccggattctctttcttcttctcgtcaatcagagtctttagcttcgcaaatccgccgacttctttctgttctccatctacaattgttgaaaaactgtttaaatgagagtgtgtgtcatgcgtaaacaaaacatctaactgtttgcttttttctgccgcttctgccggaatattcattacaaatggaagaagcattgtaatgatcagcaagaatgccagaatcttttttcctcttttcataagttcttttctcctctcaaaactcgtgatcactgggctgaaagccccgaaactacggtatttatttcagcgactacatatagtcgctgtagttacttatattctgtcagttcctcataatcaagatcttcaaaattaattgcaataatctgctcttcgtccacgccatgctgttttagataatcctgataaatctccaatagtattgattttccacatcgtctcacctatgataatgtaaaaagcaataaaattcaatagtttttgcattctattaacttttatagattctattattatttctaaaattttataattttattactagactaaggcaaatcgattttattttctcttaattgcattccttttcattcagtgttagaatttatattattgctctaaaatttttactgcaaaaataaacagggataagaggataaagatactatgtttcagatttttgttgactcggcagccaatctgccggctgtaactgcaaaacaatacgatattcacgtgatttctttcgtcaatcttgttgacggcaaagagattacctgttttgacccggatctttcaccagaggaagaacgtcagaaaggaaccgaatattatcaggccatgagcaggggctgcgaaatcaaaaccggactgatcagcactgctgcctttgaggaagcatttcgaagcgcactcgaagcagaccaggatgtgttatatttctcactgagtaaaaatatcagtggtacttacaattctgcaagattagcttcggaagagctgttagatgaattcggagagaaacacaagattcgtctggtcgactctctcaatgcctcacttgcccagggaatccttgccatctatgcaagcgagatgcgtgccaaaggaatgtctgtggatgaggtcgctgatactctggaatattatgttgaaaaaatgaacggagtcttcactgtcggggatttaaaatatctttctcgcaccggaagaatcaaaggaagcgttgccaccatcggaaatgttcttaagatcaaaccaatcttacgtggaaacaaagatggctatatcgttttttacaagaactgtcgcggacgtaaatccgcattgaacgaactggtcaatctggtctgtgacaacattgtagaaccagaaaagcagattctcgggatcgcacacgcagatgcatatgaagattcgctttacatcatggacaagatccaacagaaaatcaaagtgcgtgattttataaatacttcttatgatttctgtaccggaagccatgtcggaccggatacgattgcacttttctttattgggaaggacagggaactttcataatatatagataataaaagaggaacaagcccattggcaatacacatgccacctgctgttcctcttcatttataaatctgcccgttttttcaaaaacttctgaaatgcctcattgcctaaaatccaatgtgcaaatcaagaaaaccaggaagaaaatatccctgtgggtgcttacataccggacacaatgcaggtgcttcttttccttcgtggatgtgaccgcaatttgtacagatccatttttttgttccatccgcattttcacacatataaaacgtattattctccaggctatctgcaatcttacggaatctttggctatgtgctgcttctatctctgcaatctgctgaaatgttgctgctgcctcaaagaatccttcctgtttcgctacatctgcaaatgccggatacacatcctccgcctcttcctgctcattatgttctgccgcacgcaacagctgaaccagcgtcttcgtctcatctaccggataacttccatcaataaagatattcgttcctgatgcttcttttaacaattcatagtatcttcccgcatgtgcccgctcctgatctgctgtgtacaggaaaatatctgcaattgcaggttttccttctttccgtgcctgctccgccgcaaatgtataacggtttcgcgcctgtccctctcctgcgaacgcacgcatcagattttgttttgtcttgctttctgaaaataaaacagccatgtcatatacttcctttcttcagatcttttactcttttctaaaagctaaattcatccaaatcagtatatgtcatgactggtttattaattcacctgtcctaaatattcatgggaattttttttttaattaaacccgatcaatcttcttgcaaccgtatacgcaagtgaagacactcttcttcctgatcttcccggaagattcatcgtctgtccaagaattccataacggatcttcatataagtcctatagtcttttttcttcagataagcccacagttctttcttcttctcgaaattctctttcttcttagagcgaatgcataaaatagaagaaactgtcatcatgattgccagataattcaccatatattttctcagcttcttgcttccgatcagacgaagctcatacatggagatcattttcttcgttacgaaaagctgttggtcgattctgctgatcatcaccttctcattgactgactgatcctcacgtccgatgaaatatctgtaaagatctacattcatgtaataaagtgtacgaacatgtggcagcggataatatacataaatattgtccacatagaatgtgtgcttcggcagctctaactgacaaagcttaagcatctctgtacggtaaattacagagtgcatcaggatatactgatcgagacggaaatgtccgatgtcctcccatttaaaaatctgattctccggaagaacgttatcgtaacggatgactttcttatgtgtcatgccgaccttctcatatacatagttcgcaatgaccatatctacttcagactcatcttttacaaatcctttgatcgtatcaagaaccttcagcaatgcttcctcgtctacccagtcatcactgtctacaaccttaaaatactttcctgtcgcatgctccagtccacagttcactgcatctccgtgtccaccgttcggcttctcaactgcttttacgatcgtcggatatttttcctgatatcgttctgcaatctcctgagttccgtcttttgaaccgtcattcactacaatgatctcaacatcctcgcccccaacaagaatagaattgattgccttttccatatatgcctctgagttataacatggaattgcaaatgaaatatatttcatggtttttcctccattttaaatgcccgcctacggcgtcgcttccttttcttttacgtttgactatctcatgaacccgcgctaaccgcgctctaccgcctgttacacaggctgttcattcgataatggcgtaagaaaagtaaatgccgcctttggcgtcgcttccttttcttttacgctcattatatcatcttttcgacttattgttgtaaattttctttttttcagctatagtaataacgaatcatcaatatattattgagttcttagaatatattgacaacagaaatcgactatctcaacttaaaccaaaggagaaactttatgaagaagaatgcaatcgtcggacagtccggcggaccaaccgcagttattaatgccagcctttatggggttgtttacgaagcactgaatcgtgaggatgtcattggaacaatttatggaatgatcaacggaatcgaaggtttcctgaacgagaatatgatggatatgaaacctttagaagcgaacggtgagcttgaactgatcaagacaacaccgggatcttatcttggttcctgccgttacaaacttccggaagaccttacagatgccgtctacccacagctctttgagaaatttgagaagtacaatatcggctacttcttctacatcggcggaaatgattccatggatacagtaagcaagctttcccgctatgctgagactgtaaacagcgagatccgtttcatcggaatccctaagacgatcgacaatgaccttgtcctgacagaccatacaccgggattcggaagtgctgccaaatatgtagcgtccactgttcgtgagattgcgatcgacgcttctgtttatgataataaaaaatccgttacaatcgttgagatcatgggacgtcatgccggatggctggccgctgccagtgtccttgcccgtaaattcgaaggcgacaatccggttctcatctatcttccggaagttgcatttgatcaggaacagttccttgcagatgttcagaaagctttcgagcatacttccaacctggttgtatgtatttctgaaggaatcaacgacggaaatggtaaatttgtctgcgagcttgcaagtgatgtaggtgtagatactttcggacacaagatgctgacaggctccggaaaatatctggaaaacctcgtgaaagaccgccttggcgtaaaagttcgctccatcgagctcaatgtcaaccagcgttgttcttccgctatgctctctgcgacagacgagaaagaagcgattgcttccggttctttcggtgtgcagactgcactgaagggaacaacaggaatgatgattgccttccaccgtacagacgatgcggattaccacattacttacgctccggaagatgtaaatctcatctgtaatcaggagaaaacagttcctttagactggatcacaggaaatggttccgatatcggacagcagttcattgactatgcactgcctctcatccagggttctgtaaaagtaccggaagaaggcggactgccgaaatttgcttataggaaatgtaactgttcagagccaagcaaaatttcataaaacaggtgtaaaatgcttgcatttttaagactgtttttgaaattttatttggcggatacgccacaccgacgaaatgcgtagcattttggaggttgactctgaacagttactagatatgagtgagaacaaaacagagagaatacgtttgtaacttgcgtatcctctctgtttcgtttttcagagtattattcttctcaactatttttcagcacatattactctgcagctcgctcgatcagcagattctggatttcatctcttgtaggcattacgcgcagtgcaccttttcttgttgtgatcacagaagctgccgcatttgcaaatgtcagcatatctttcaggttttcttcctttaagtcttccattccatgttcacagatataatgtaatacacaaccgcagaatgtatctccggctcctgttgtctcaattgtatttttctgaaggaacggttttacctctacaatgcttccattatagtatgcacggcttccttcttttcccatagatacaagaatcagcggaatctgatatctttctctgatccagtttacacctgcagtataatcctcttcacctgtcagccactgaatctcattgtcagagattttaagaatctggcaatgtccgagaccgtataacacctgctcttttgcctcatccagtgaattccaaagtggaggacgtaagttcgggtcaaaagaaataatcgcaccggactcttccgcaatacgaatggcttcttttgttgcttcgcgcactccttcatgtgtcatagacaatgtcccgaaatggaagatctttgtttctttgataagttcttcacaaatctcttctttgttcagcatcatatctgctcccggattacgataaaatgaaaaatctctgtctccgtccggataagtatgtaccatagcaagtgttgtatggatttctttatctgtgcataatccggatgcgtcgatcccaacttctgtaattgcatctcttaactgctctccgaaaaagtcttcacctacttttccgataaatgctgtcttatatcctaactttgtcagcatcgcaagcacattacacggtgctcctcctgggtttgcctcaaaaagaggatttccctgattgctctttccgttttctgtaaaatcaatcaataattctccaagtgctactacatcatattttttcattttcttctccattctgctgccaaagcgacaacattttttctattctcaacagatttctattttttcacacaccatctgtactgataaggattcatccataccgaattcatctccagtttttctcctgtaaataaatcttcatattcaccttccagacaattcagccatgcattctgtccatactccgagaaattagccagacagatcagttcttctcttcctgctgtccttctgattgcgaagactgaagaatttcctgtatcccatgtagagatacctgcagtctctccaaagcaattttcctcacgtctgaattcttccatctgtttcaaaccattccagattgcatactgtacagtacctggtttttttctcttctctgcattctcccactggaacggacttcgatgcagatatcgactgtccgcagcagtatccgggtttttcttataattgtaatcattgacctgaccgatctcatctccggatgaaagcatcacaaaaccttccatgctcatacatgccgcatgcatcatcagcactctctggattccctgtttcacctgctcaagatctccttcaaatccacctttttcgattccacacagacttgccgttgttccacagcttctggcatctttggtcaccggatcgtaattataaagctctccacgagcaaagctgtacggatatgtcccctcaaagaaatgatataaatattccttgtgctgaatcggatctatctccagtttcttctcttgctcttcatccagtccccagccgatatcatcatgacagcgaaggtaattgacaaaatagcagttcttcggaagactgtgaatcacatccatctgatgcttcagcattcttgtgtctcttgtagccagtgctgcccacagattcaccatactggaaacaccgtataacatatggcattccggctcttgctctgttccaaaataaaccggaagttcttttggctccataacaacctcgccttttaagatcacacctgggcaaaccatttcaaggatcatacgcagcatacggacaatactatgaacttgcggaagatttctgcagttggttcccaactccttccaaatatacggaactgcatcaatacggaatacttccactcccatattagccagatacaggatatttcctatcatttcattaaatactttcggattgtgataattcagatcccactgataaggataaaatgttgtgagcacatgtctgtgcatctcttcacaccatgtaaagttgcccggcgcagtttccgggaacacctgcggcatcgtcttctcaaactgatccggaatctcgcgtgtctcataacactgatagcgatccatatattcctgttcgtctcttttggctcgcatcgcccactcatgcgtatctgctgtatgattcataacaacatccagacacagactgattccgcgttttctcagctcttttgtcaacttttccaactcttcgtttgttccaatttcaggatctacctgtttaaaatcctctaccgcatagccaccgtcattatatggatgcggcattttcagaagcggcatcagatgaagataggtgatcttctgctcagacaaataatccaaatgctctatcacaccgtttaatccccctgcaaatagcttcggatacatcgttatcccaagcatatttctgtttcgataccaattcggttctttttctcttttattatctaaccgtctaagttcagcaggtctgttctgataagcctcttccaatgactgcattaattcttcataacattgttcattatgatacaactgcatatatttttcgtgcagttcgttttcatgtctttttcttcttacttctatcatcaatactatactcctatactacataaggggattccttaatcaggaatccccttatcattatccatgcattttcaatctcaatgtatatttatcatgtaacttctataccagatcatatttcactacatcgattttagctgcaccatcagcaaagaatgaaattccgtttgcttcctgttctgtaaacataacagcagacataacctgctcgccatcgttaataaatacttctgcgctgaatctgtccagaatcacacgaagctttaactcattggcatctccatttaccagacatcttctctgatgaaccagtgctcgttcggttcctgaaaattttctgtcaattttcaatacagactcatacgggcggaagctcaattctgtatggaatttctcattctgtgcaaaacgtaatgcgaatttcttatatacattttctttatcttccggacgtatcacgagttccatgtcgatggttcgtccttcgacgcgatctaatgtgatcgtatcattatctattactacatcgttgtactcaactctgtttttgcgcagtgcatcgagttctttgattggagtttgataaagtcttccgttcttcacagacaattctctcggcagactcatttgcgcaaaccattttgagtcattacaacgatgagcaagcgtatcccagttctgcatccagccgatcataattctgcggccatccggtgcttccactgtctgcattgcataaaaatcaattccataatccacagactgattgaactgctcttttaaggtatatgtatccttgtccatttctcctatgatacataaagtgccgtttccggtatgatattccaaaccttccggtaacatatcctgcggacttgtcaggagaatgtgttttccatccagttcaaagaaatccggacactcccacatctttccgaaacgtttcttattttctgcaaggatactgacaaattcccagtcaaatccatttgcacttctgtaaagaagaatctgtccgcttccgtctgccggtctgcttccgatcacacaatagaagtttccgtcttttcctttccagatctttggatcacggaaatccactttacttgcaccttccggaagatccttttctgtcaagaccggattcttctcatacttcacataatctcttccgtctccgacagctaccgcctgtgtctgtatatctcttttacttccatcttctaatgtttcatgatctacggctgtatacataagcaattgtctgccatcatccaactcgattgcgcttcctgagaaacagcccatcttatcgtagtcttcatctggtgcaagagctgccgggagatattcccaatgcaataagtctttacttaccacatgcccccaatgcatactgtcccaatgtgtatcgtatggattatactgataaaataaatgatattctccctgatagtatgaaaatccattcggatcattcatccagcctacatacggactcacatgaaaagccggtctgtcttctgcttttatctgctttccctgttcatcttcatattttctagccttttctaacatctcactcatgcaaattctcctgttgttcgtatcgttatttttcttcacttaatgacttctgatactcatcaaagtacttctgtttaattgaaagataatctgaaagcccatactgttccattttctttagataggaatcccactctttttcaattcctccattcaggatccagtctgctttcttctgttctgcatatttttttatatctgtatcgtactgagatactttattcgtatcatcaatgctcataaagacatttggataaacatatttactgttcatatcctgtaaataagtttcatgcatattatccaaacgccattttgcatcttccggctgtgttacatatacatcatagtattcatttaaaactgcaagagggccatttaccgattgtgcctcacgcacttctaccggagactgtgttccaagatccatatgctttagcatttctccaccatctttgtttgtggacagttcaaaaatgttaaaggagtccttttctccataagttccccagttattctgtggtgattgaagtggtgcatacatctggtcaatccatgcagcagcaagtgctgtattccgacaacttgacgtaagaacacatcttccacggtcaaatccacttgtttcactgttgttctgtctcgtgatatttctcatgccattcggtcctgtcagcgccggtagcatcacataatcttcattgttatcaatatttgcaatgtcccatgtaaaacaaagaccgtatcgatggttcttaccttttgctacataggtggaccactcttgtgtaaatgcttctgggtcaactaaatcctctgtcacaagtttatgtaaccattcaattccttctttataaccttcctgaacagttgtgtaaataacttttccttcatccgttacagcgaaatgatctcccgtatctccataaccttttccaaatccattgattaaaattgccggatcttggtctccgttattgataataaatgacattggaatcacatcaccttcgattgaaaattctttttcaagttcatctgcatgatcacggaattgaatcaatacctgttccaattcatctgttgttgtcggaatctcaagtcctagataatccagccattttttgttaatatatggaatatctccgattgcctgaatggcttctttcccggctccaagctgttcaatccaagggaatgaataaatatgtccatctggtgctgtacacattgtcctatattctggatatttttcaaatactgcctgtaaattcggcatatatttatctatcagattttctaatggaataatgataccctgctttgcataacgcaatagatcataatcactcattcctgcattgaataatccgtccggtagatttccaaattgagcaagtgccagatttttcttatcagaaaactgatccgatacaaaacaagtccaatcaatatgaacattcgtctgctcttccattctctgaaagattactcgttcatttggctcctgtgttgatgtagccggtgcacttgtaataaaggaaagttctgcagtttccttcaatggaaactgcacttccgttgcaggtgtatccgggttgatttcagcttcaagctgctgctcttttccacaacctgtaactcccaccagcatcgtcagagatagtacaattgcaagtaatgcatttacttttcttttcttcatatctgtatcattcctttcttattagccttttaccgatccaaccataattcctttgtcaaagtacttctggaagaatgggtacattactaacagtggtaaacttgatactacaatggttgcatatttgagctgttctgctatttttgccatttccgctgtgctctgaatatcggcaatcatgcccggctgtggtgtattctgtactaagatagaacggagtactaactgtaatggctgcaaattcgcatcattcaaataaatcattgcgtcgaaataactgttccacattccaacgaaagaccaaagcgccagtactgcaatgattggcttacataccggaatcataattttaaagaaatgttggatttcatttgctccatcaatcgcagatgcttctcttaattctgttggaattgactgataataagttcttgcgagaatcatattccatacattaaatgctcctggaatcaggattgcccacactgtattaaccatatgcaattgattgatcaaaatgaatgtaggaatcattccgccgccaaaaaacatagtaattaagaagataatattaaaaacctttcttcctacaaattcttttttggacagcggatacgctgccaacaatgtcacaaaaacagaaataactgtaaatgcaagtgaatacaggaaggaatttaaaaagccacgccagatcatttcattctctaatactcttcgatatgcatctaatgtccagtccttaatattaaaactcaatccctggttattcaaaacagtcggatccataaaggatgcaagtactacatagataatcggtattgctatagaaaggacgaataaaccaagaatggtaaatccgattccaaggattactttgtctgtccttgaatattttttcttcttttttttctccatctcttctccctcttttctataatccttctccgtcattcagtttcttaacaacacagtttacaaagatcaacaagataacatttacaaccgagttgaagagacctaccgctgtcgaatatccataatctccgttcagaagtccaatacgatatacatatgtagacaggatttctgatgccggcaagttcatgtctgtctgtaaagcatatgctttttcaaaacctatactcataatatttccggcctgcaaaataaactgaattacaataatatttttaattgccggcaactctacataccagatctgctgcagaagatttgctccatccatggtcgctgcttcttccagctccttgcttgcatttgccaatgctgctgtatacatgatagatgaccatcctgctgcttgccagattccgcttgcaatataaattgttcggaatgcagaaggcattgtcaataggtgagtgctaattttttgagattttttttgcaaaccctttaaaatcaatggtttgcagtatcttatttcttttgaaattgtgattttttctgttttgacaccaatttgacaccaatttctctttttgtggtgtcaagcatttaacaccatactatctagtcttgcaatctcattttcaatccttgtcagctctccaatatggttatacacttccattgttacatctatatgagcgtgtcccataatatattgaagaacttttacgtccatacggcactctgccattctggtacaagctgtgtgacgcattacatgagctgaaaactttggtaacagctctgctttcctatgctctttttttgctctctctacttcggttttgttatatgcgtctacaatgttgtataaaacactatttacgccattcggcataagcggtctgcccgattttgctgtaaagacaaaccccgaacacccgtccacctcaatgctcttatcctttgcaagcataaaattgatttttctttgttcctcaaaggcttttgcaacttcttgtgtcataggtataatacgaatacccgacgacgtttttggtgttgagatatggaacttgcaaccgtcgcctaaattcttataaatgagctgatggtctacattaaccgtttttgccttgatgtttatatctttccatgtaagaccaataagctccccacatcttaaccccgtaccaatcattatggtaaacataggataatatgtgttatagacattgctctgttttacaaactccataaacttttcttgttgagaaactgttaaggcttctttttcctctgctggttttccataatcactaatggaactttttgcagggttctttcggataatatcatcatcaacagccatttctaatgcaggataaagcaggttgtgaatatacttgattgtagaataagcatatccagctttggaaagtttcgcataatacgctttaatatgtgagggtaaaagctgaacaactttaatatttccaatctcgtcttttactctgttttcccaagcacgaacataactaactcttgtagtatcagctagctcacgagttctggaagttttttcaaggcttctgccagctcatcatcaaggacacgaatatcaatgccacatactgaaaagattgtataatctgtttcgtagtcatcccacacagcaaaattttcaacgaaaatttctggaagttcacagaatggaatttctttatcttttcgtcgtttcaatccttgttggtagtcctttacaatatgacggacaactttcttcaaacaactttcaaagcgacattgaactgttttctggaagtcagacggtttcatcaatctcaccccctttccactatgatttgaaaagtgtttatccctctttccgcaccatatagggaatgaaaggtgtgatttaatgacctcttttgaaaaatttttaaatttttttcgggtatgaaaaaagcccgcacaaaacatatagtctgtacgagcctttaaagctaaaacatattcaatttttaatagtgtgctattaggtggaatttgattgcaaagaattgtacttaaagctttccataatgcaagcccccttaaagcaccgtatcaatgttggcatggttttcaaattactctgaaaaattatgaactgttccttttggaaatgtaatggtcagtcttgtatattctttttccgtagaagcaatatccaatttcaagcccaacctatcgcataattttttcgatagatacagtcccatacccgttgcatttgccttgtttctatttgaacccgtaaaacctttttcaaatacacgggataaatcagacgcttttattccacaaccattatcttcaaccacaagcaatatatttgtaccattgtcttgactgtatatcgtcagcttattttcttgcttatcaaaatacttaatcgcattttgcacgatttgagatagaatgaatgtcagccatttttcatcagtataaatgacattttctatgtcatggatattgataattgcttttctttccataagcgaatgacggaatttcagaatgacattatgtatcacttcgtctaactgcaactgttttacaaaatagtccttttccgtattttcgcttcttgcatagtagagcatttgttccactaactgaaatattttgtctgtttctttttttaatgtgtaattttttgtattgtcaaacgtcaaagacaatgctcctatcggtattttaatttcatggacgaaactttccacatattcttgatagtcctgcttttcctctgtgattttgccgatttcatcattcatagatttgcaggctttttttagtgcgtagcaataggctttattttgaaattcttttggctttggtaaaacgtctgcaatataataggtttcttccagtccgtctactaaatcaataatatgttgtgaagcgttacgcttcttccgatacaaacaccattgaaaaagcccttgtatgctgatgaacagaattaccagcgatacaacaaacagcgtatctacaccgtagaaaatcaagagaaatgctactacggcaagaaagaaaagctgaaacaatatctctgttattttttcttctaagaatgtaaaaaaactcacagtttccaaccctttcctcgtatattttccaataaatgaacaataccgatttctttcattttcttttttagacgggtcatattaaccaataatacattttcgtctatataatatttgtcattccacagcttttccaatagttcttctttgctaataactttatcttcgttcataaagaagtagtacaaaatacgaaattcatttcttgtcagttcaatgctttgctcttgatacttcaaaatggataaatgtaaatcaagggtacaatcttttttgacaagctcacggaaattactcgggtttgacaactgcaatgcacgcttgatcttctcaagaagaataagcgtgtcatacggctttgtgatgaagtcaattccgcccacttgaatacttttcaattcgtcagcatttgtatctctgcttgttacaaagataatcggtactggcatgacttgttttattttcctgcatacttcgtagccattctcatacggcaggttaatatcaagcagaaccagttctatggaatattgctttaattcctctgtcagatttccaaagtcagtcaataaaactgtttcatatccttgtgtgttcaatagtttagaaagctccaaacgagtgatttcatcatcttcgataatcgctattctcatttcaacacccccttgatttaccattataataattccacagcaggagagctagaaaaatctaactctcctcattgatatttcgtttgaaaccgatatacgtcgctatccagtaaatactataaattaggaagaagataattaaattcaagccaaagtacattagataaaggtgtttatctcccaaaatttgttgatacacattattcaatgacgacatcatcacaaaagaacacaatattgctgatattgcagggacacaaaataatatcaataattgttttctgattgtcttaaatagcgacttatcatttattcctaatcttcgcaaggtcaggtagcgatatttgtatttagtagagtcgctcaatgattgaactgccaaaattgttcctactgcggaaatcaaaataaatgcaatgtacataaacagactgactactattgcaaccattgctttttgttgttctatttctgcacctcttacgtttactctatacgactcatcatttatttctccattttcatcaacctttactaattgatgttgcatatcttcttttatcttattttctaattctgcgtctgtatcttcttttgtatctataatcaaatgattttctgatacttcaagtccttgaacatatttatctggaagtacaacaacaaatctgccagtattagttatagagttccaataagacttagtgtcatatccttttaatttcaaatttttatttgctactgttatggtttcaatgtctttgttatcttcaacctcatatgcaaacttgctatttgtaactatatagtattcgttatcatttaaagaaagcaacggcatctttcttaattctagtaacctattataatcacttaacttcaagactgggtcaaaatcataatattctgattggaagaatttttgtacctgatgattcggctctttataaatgtcgtactcaatggtattatcaatcgtatattcttcttcaattactcgaatatattcatcaaatacctgcttatcatcaaagagttgtatatcatatggtgcatttaaattcacgctgatatcatacgaagctttgttgatactagaataattcagagccagcagtgaagttaaaatcaacatagacaatgtaccaaatgtgaagctcattgttcttgctttagaagcaaatgttcttgctacaaacagattgtcattttgatatttcatttttttattctttaacaaaacagtcaagaacatatctgcacaagttgtagatataccataaatgctgataatcaacatgattacgcttaccatcaaacaggtaagtgtttcttgcttattaaaattatccatagtacaacgtgaattccagagaaaaagagaaatcgcaccaagaataatacttaaaacaaaaatgacatttctttttttactgtcacggaacattttcttttcattttgtttatcaaagtaaagaaaatcacgtatcgtcattttacttattcttcttaatagattaagtaaaaccaaaacataaatagttaaaaaataaattatcaatagtccaatagaaacaaaattcaaagaaataaagagagtttttggaatacccagtaagtttacaattactaacgacacaaactggctgaataaaaagccaataggaatagctaatacaattgctaaaattcccaacagtatattttcaattacaactaagtgggcaatttcttttttcttaatgccaagaagcatatatgttcctaattctttacttcttttttcaaacataaatttcgttgtatagttgatcaaaaagcatatcacaaaaataataagaatatttacagcgaacaatgaattcttaaatgcatccatactggaacataactttacaatttcatcagaatttgccaccaaattaaaagcaaatataagagaaaaggatgcagtaacggttatcagataaatcaaataatctttaatatttctttttgtatttctatacgctaacttacctaacatttcccacttcacctccgagcaaggttaatatatccagtatttcattgaagaaatcttttctgcttttttcccctctgaaaatttcattgaatattttaccgtctttcaagaacaaaatacgttcacagaaagacgcactaaacgggtcatgtgttaccattaaaatagtagcctgcattttcttgttgatttcagacattgtttccagtaataatctggaagcttttgagtccaaagctcccgtcggttcatcagctaaaatcagtttcggttcattgattaaggctctagcacaagcacaacgctgtttttgtccgccagaaacttcataaggaaatttcgataaaatatcacgaatacccaatttatcggcgatagcatgaactcttttctcaatatcagtagggttctgtttgttgataaccaatgataaagaaatgttttctccaatcgttaaagtatctaaaaggttgaaatcttgaaaaatgaaccctaaattttcacgtctgaaatcagcaaaatctttatccttgattttggtaatatcttgattattgactgtaatgtgtccgctggttacagtatcaatcgtagagatacagtttaatagggtagtctttccagaaccactagctcccatgattgcgacaaattcgcccttatctacatacatagaaataccgtctactgcctttgtgatatttccagagttacccccgtagtatttttttacttgctctaaatttaaaatgtgttccattaaaaatcgctcctttcttcctgccacatttatttgttttggaatacaattaaattatagcaagggcagtattcaattacacttacagttttgaaagtaaacagagagtaaaagagccgtgataatgcagatcacaattttgtgaagcatttccacgacccttttattataattttgcctttgtctttttcgtaatgatataaatatattcttctggtgtagggcgtttattcccaaaatactttttgaaatttgcctgcacctctgggtcggtgctattcatagcttcatcaatcgtagcttcaatatccgcccgaacatcagccaatgatacaccgccagcttttgcaccagctttcaatgccttttttatatctcttttgttcagtcctatcatattcatacctcaattctactttttaaagctaataagttttccgttgtattttacaatgatgaatatgatataaaacactcctacaaaaatcaaaataagacctatgtaatagcctaattcagaatgagagattaaattgataatcggcataacaagaataccaatactaaccagtaaagtgcctattcctattttttttgtaaacacctttttatctttagggtcaagttgtgtataatgataaccatgtaataaagtaatattctcttttattcctatttgataagatataaaaagtaaaaacaatcctataactatttcaacaatcaattcctctaattccataatcgttctctcctttaatcaaaataaaataattcttcaaattttttatctaaagctatacaaagcactaatgccaattttgctgttggattgaattgtccagtttcaatagaactaattgtattccgagaaaccccgactagttcagctaattctgtttgtgataattttttttcttttcgtacagtttttaatctgtttcgcaaaattaaatgttcgtccattctataaacctatcattaaaaatttataaaagtaataccccataaatagaagaaagaataaagcaataacaaatttggatttattttttgaaatatgtgcttcataacccatagagccaaatgccacagacccaataattgtcattatgtcatagtaaggttctttacaaactgctttaatgaaaagaattaaaatgcagataaataaaacaaacattaagccaaaagatttcccttgaagtttaatatgtttttcgtattcatcaagatatagattctcttttttgttttgtgatagtattttttctttatccattatataacgctcctttcaaataataccaagtacacttgtcatttatattatagcattcggtcattacaagtcaatatttttgcacagttttcttgtcgttttgtaaaagcgtgcaaatctgataggaaatgcacgctatatcatttatcctacaatcttccagttactatccttatgtagcacaagctcatactgcgatacctgcgtcgcttttgtctgattatcaatgaattttaccgcaaccttgactttcacattgtcgccgtcctttataaagatagggtttaccagttcagaataaaggtagtccctgccgataggttcaatcacatttcccaatacatagtaagcaagctctttttccgtcgctgttgggtacagcttaaagaatgtttccagaaaagcggtagcgtcatttaccgtatcagcgtccacgcttgcgtctgcttctggtgtcttaggctcatagtctgatttttcaactgctggtgcaagggtagggttttgaacgattaccatatccccgtctgcgtccacatagacttttacagtataggttgctttcacattgcttgtctgttctccctcttttatctgctgatctacttcgtaggtagcagaaaaagtgtccgttcccgactgttcgatactccatacaatcacatctgtaaccgtggagctggttggtatatcggttctaatggtatccacattcaagccctgcaattcctttgtcagataaccgttgattgcctgcgtccttgcttcaatcgcttctttgctgttattccatgtgtaataggacttcgcaaaattcttcacgaaattttctatcccgttggtgtcctgcaagcgaagttcaatgatttctttttcatgggtggtgtgctggtcgatagccgtaaaattcttatacaccccaaagctcacgcttgcgacaagcaccacccacaacgcaatcacggttttcttatgtgtgcctaccttgacagtacgcacctttttttcttttggttctttgatagtttctgtctgtttcttattcttcttaaacatatttttcaagtcctttctattgttttactcgtcctgcaccgattaagtgctgttgccagtaactactacttaggtctgcatatcctatcgggtcgcctgcatggtacatctggttatttcctacataaatgccgacgtgggttacatacgaaccagcgttataggtagaatggaaaaacaccaagtccccagcctttgcctgcgagagtgggagatgttgggtagcgtcatactgtgcttgtgccgttctcggtaaagagataccagcttttccatagcaccattgcacaagtccgctacaatcaaaggaagtgttcgggttactgccaccatatacatacttccagccttgatatttcaacgcttcattcataatcgcttgtgccgtcgcattatcaaaatgtgccacggtcagatattgattgagtaattctacgtagaacatatttccgtaaccatatcgccagcccccgttcttcgcaacggctatcgggttagtataggttactttctttccacccgacttttcacgggcgaagctctctgcaagattaaaagtgtgtttctttccttttccagctacataacccacatagccaccgccatagttataagactgtattgctacattcaagtcgtcgataccttgatttttgcaggaagaaagcagggacgcaaaatacttacacccctgcttgattgagctttccgtatctaaagagttgggcggtaaacccagactttccgaactctgcataacatcttctgccgtaccgccactttctacttgaatgatagcaagtagcacattgacatactcggagataccgctttctctggcgtacttttccaccataggctgatgtttcaagacttctgcggataagttcatacccgtaatgccagaagaaaagttgctgttctcatcgtcgctgtccgcactaatcagcaccccaaagaaaagcaccagagaaaagaggataggaaacagactgccgataagagcgatatgtttcagtttcattttttcttctgtcctttcttcgttacaaggttacgagttttctctatggtctgttggttcttctggacggtttgcgtttgctgaacctttatcctgcggtctttggtgtcattctggtgtgtttcctgcgataccactttttctacattctgcctatgtactggctgtgcaggctgggtcgcttttctatcagaagcaccagaagataacggacgctcttttacaacattcgtcttgactggcgcacttgcttttgaagtggtcgctgtggcagggcgtttcacttcctgcattttttccgcactcggctttggaatggttgaagctgtggctggtcgctcatggggacgggtagctcccgttgtcgctgatccgtccgtctttcgctgtgcctgccttgcttcttgtgccttttgaagctcaatacgcttgtcagcgatactctgtctatgctgtgcctgcctttccaatcgtcccgactgtctggactgctgttcctgcaccatgccacgcttgaagtcggacacgctggactttgccttttcctttgtggaatacaccgcataagcggtctgtgtcggcatatccttgatattctctttgacagcatttgccttgtctttcactttatttttcgtatctaagacagcacccacctttgagcctgcacgctgtcccacgctggaagtggtattgccccgattttctttagaagcggtattttttctttcagcccgtttgccagcaacggcacttccagcaaccgcaccagcgacaccgcccgaaataccgccagcacttaccgcccttgcaatacggtgttccatacgcctagcccgatgtcgcataaacagatacggtctgcggaaaatcctgtgtcccatgctttgactgtcgccagcattaagtgagaacatactcattaagtcgcccagcttcatgtagataccagcgaaacacactatctgcaagaacgccaccataaaaaacggatagtccgtggagatgttataaaacatactggaaatgctgaacgctactgttacaatgagcgttattcctgcccgtgtcattatggtattaaacaccctcacgattgcctgctttgccatgctttcataactcggtatcatggaaagtagaaaactgataggtaaaaacattgcaaagataataaaaagtatctggctaaacaacatcatgcccgtaagcaagaatacaaatatcgttatccctaaattgaagaacagtaggaagaacaccatacctaaacggttcactacctgcggtattgtcagattgttgttgtcgttgtcctcgatttctgttttcacgacttcctctctggttttcccgtcctcgtcctctggacttgccgatacaagagcttcgacacggtctgccccgatttcttctgtgttgctgttaccgaattgcagaagtagccacggctgttccacttgaatagaaaataggctgtcccgtatcaagtccacgctgtccttgccctcgctgtcagagttggggagcatgatttttgttcccaagtccaaagaagcggtactgatgtctgatgaaaattcatttatcttcttgatatagtcgggagcgtaggcaataaaagaagcggacagcacgaacaccaccacaaagttgataacagcgtgaagtgccttgctggtttcccgttttatcagtcctgtatctgatactttcaaggttgctgtctttccagcttcaacctttaaggaatatacagttttatccactttatatcctgctggtgcggataattccttgatatagactgtgccagccgttacctctgcaacatctgtatttccgttttcatcagtcgtaagggtggcaagctgtttcgtgcagtccttatcagaaaagacaccataggttgcacctgcaatagagtaattcccgttaccgtctgtaatgctggtattactggaagtcttttgcagtttcgcatttccgacattcagtttcgcccagaattgccctaattcctgcccctcgccagagtagatataaccgccacattcatagcgtcctttattttctttgacaaaggctcttgcaccagcgaaaacttcgtcctgcgtagcctttggtatttcatcataagaagctcgcacgttatcacattgccagccaagatgtacgcttaatctctgccagaccacacattgttccaacagatagacttgcttgtagttcaattccttgtgagtttcgccatactgtttgacataccctaaggataacgccacatctgaaatctggtcggcactcatgcgtgagcttgcgtcagctctggtcttgtagccgttcttaaaatctgtattgatgtcaatacaataggcagtttcgccctcgactttcatatagccctcattgaatgtcgaaccgatagaaccgtcattcattactttttcaatgataccgacacgctccgcactttccgtccagtattgcttgctttctgcatgaacgggtgtagtcggtaaagcagtaacgacagttgcaagagctaagaagcccatacacaatcgtttccatgtctttttcataaatctaatgctcctttcatttttggtaataaaatagccgtccaataagaacggctggaaatagaaaaggaacgtcattttaggcgttccatagtctataaaatattcaatttttttactgatgtgttactcatcaaaatctcaaatcaaggttatttgacaccaattttgacaccaaatttttgtatattgacgatttttgatgaaatgtgataaattcataaaacccgtaaaaagcctgtaaataagcactttacggcactctatgaactaagacaaaagctacgctgtaataacaataggtttgtgctaattccgagcactttgttcagcggtcctacaggtgataaaagcatacgaaccataccacaaagtacgatgactgaaataaaattcggcatatagatcaaaagctgaactttctttttaatccctgtcttacggatgcgatttagaagcaatgcaagaataatcggaaccgggaatccccacaacagtccatagatactcaattttaatgtattcatcagataattcataaaatccggtgaagataaaaatcgcctaaaatactcaagtcctacccagggactaccaagaactccttttattacattgtagtcttcaaaagctatcaggagaccacccattgggagatacttaaaaataattgtcagtaaaagccctggcattaggaagaaaagatataactgccagtttttcttcatataagtcatcttttctctccacgttcgtttgctcacggactttgcttgattttgcattcttttcatgcacttcttcctccattcctttaactctatggaaaaccggttacgtaaccggttactttatagtttgatattactatattcttctatttctgtcaacacttttgtgcgataaaataaccggttacgtaactggttatttaagtgttgcgtttttccatgaaaattgctatactaaaagatattatgaaccatcagccatcatattgaaggagattcaacttttatgagtaaaaaacaggtaacttttgcagatattgcggaatataccaatttttcaaaaactacaatatcaagatatttcaatcacccggattcactgacggttgaaaaccaggaaaagatttcacaggctcttgatacacttggatataaaaagaataagctggcaaaggttctggcaaatggaaaaagtgaatttatcggaatcattgttccaaacctttatctgcactattattctgagatgctgacacaattcctttccagttacagtgattatcactataaatttcttgttttcgccagtgaacatggtgctgaagaagaacaacagtacattgaagaacttctgtcttatcagattgaaggactgattgttttaagtcacactcttccatctgagaaacttgcttcctatcagattcctgtcatcgcagttgaacgcgaagcagaatatatcagcagtgtcaatactgataactatatgggtgcacttcaagctacttccctgttgattcgggataaatgtgacatattaattcatataaatgtcaatgtgaataaatccatcccggcttatgaccgaatccgagcctttcaggctacttgcgaagaatatcatgttccatatgatatagatcttagtgtagaaggtgattcttatcatgagattttaaacgtaatccgagagattttcaataaaatagaagcaaaataccccaatcaaaaaaaaggtatctttctcgcgaatgatacctatgcaaatatgtttcttaatttaattttccaaaaatatggaacatttccttctacttatgagattgttggatttgacaactctccgattgccagcgaggcaatccttccgatcacaaccatcggccagcagattgatgtgattgcaaagactgctatggatcttcttgtccaacagatggaagagcagaaaaagcgtgttcccaaaccattaggtgaacctgttcataaacaaattgcccctgtattaattcgtcgtaatacaacaaaataatttatttttcatgattgagaacgttgcctccagcgccaggacctgattgccggttccggcgctgttttctgatatctgcagatactgagcagtaatcctagcaagatataagatgtcagcatacctgctcttcctgttccaaagaatggacagtagattcccatattaccgactcctcccagattttctaatataaaaactactgtctgaatcagaaacaatgctgtacatcctgttcccatcaccataccaagctggttcttctgatttaatgaaatcttagcaaaccgaaagatcagaaccaccagacaaagaaccagtagaatacctgccagtattccataagcagctaccacactggcaagcagatggacacttccgtctacagatgtcagaagttctttaaactgcggattgccatgaaatgctgaacttccggaaatcatttcccagatcacattgactctcgggaaatctgcagcatgatcaccgattgataatatagccgctatacgctctttctggtaagccttgccaaaacaccaaaggcctcccgcaagcagaaccggtatcagaacgactactgctccgattcccgtaagtactgcttttttacaaacctgaaaccagcctttgtaaacagccaccgccagaaccacacaataaaccaattccagtatcattgccgcgatcaggctctggcttcttatgaacagaaaataagatggaatgatcatccagaggattgcttttaaaattcctcggtatccctgacctctgtaactatataataccgctgcaaacaacggaattgtcagccagagtaagtcaatcagattcaatccaatatttccgattctgatatatcttgttgatccattcagtttcaaaccggcaacctgcagtccaatgaaaagtaacacctgatatgcgatcaagattggttttgcataaaccgcaatcctcgtataatccatatagcaaataccaatcatcagcacaagtccaagcaaaagtgccggcagttccagcgatgtatgccagctcaatgacgttcctacccagaacaagtcttctgtttttcccgcactctgctcaatacctaaaacggtctgatacataacacttcgtaaaagatagcctgcaagacttaatccaacaattagtgcgatcattccccacgccattgtcggccggtggattctatccatctcaagcccgacttctaccggatcacccatttctcgaatcgcagcttcttctgcttctgtctgactcattccttcacttaggaattccgctttctgatcctcaatatgatcattgatctcctgttctatcgtccctcttgccatcttacagcgaatctgttctgttaatgtatacaaatactcctctcgtctcatcaaacatcaccctttctaacaaactgctgcattcagcacattcactacagccgatgaataaattttccactcttctttcttctcttctaaaactttcctcccggttttcgtaatactgtaatacttacgaaccttaccaccgacctctttctcataaactgtcagatatttcttatcttccattccatgaagcaaaggatataacgttcccgcctttaattcaaacacattctgggacttttctcttaaggtctcgatcatctcgtaaccatacatatccttttcagataaaagctttaataacaacatcgttgtgcttcctgataccagacttctgtcaactgccataacaattcctcctaatcttctgattttacgttaaccgtacacgtcttaacattctcattgcaaaatgaagcgcacctctgcaatcctgccggaggctatatcaacttgtggattgactcctagctgacatatcggttatctatatatcttgtcttgattatatatcgattatctatatatgtcaataaaagcttccaagattctttgcatttttaatatagtaaaagcgaacaaacagtaattgtgagcgaacaatagcaaaaaagtcttattttgtattgttttttggatacaaaaactatactctatgggaaaaatatgttataatttgtgtacacattatgcagtataaatacatactagccatacgattcaagttttcgaactaatttaggaggagaattatgactgattctgttacaaataagatcattttaagtgccgacagtacctgtgacctggatcaggaactaaaagaacgttatcatgtacattattttccactccacatcattctggatggaaaagattataaggacggcattgacattacaccggaagaaatttatcagaaatattacgatgaaaaaatccttccaaaaacagctgccgtcaatgttgcggaatatattgaacattttaaaccatgggtcgatgaaggctatgaagtgatccatatcaatcttggcagctcactttccagtgctcatcaaaactgctgtattgctgctgaagagctcgggcatgttcatgtgattgacagttgttctctctccaccggaaccggacttctcgtaaccgatgccggtcggatgatcgagcagggattgaaagcggaagacattgccgaagctcttcgcgaacgcacaaagcattgtcatgccagctttattttggatacgctgacatttctacatgccggtgggcgctgttcgacggtcgctgctctcggagcaaatgttttgaaattaaagccgtgtatcgaagtcagcacagcagatggcagtatgaatgtaggaaagaaatatcgtggaacgcttgataaagttcttgtgaaatatgtaaaagacaaacttgctgcttatccggatatcgatccatcgctgatttttatcacacattccggcattgatccggaatatattgaacttgttaaaaatacaatcgaagaagctatgcattttgatgagatccatataacaaaagcaagctgtacgatttccagccattgtggaccaaatacgcttggaattttatttgaaacctgctaaggaggagacgcctatgacgaatacaaaacctgtttttcatggaagtgatattgaaaaaatcagtgaatattatcatatcgaccaaaacagtattacaaactttgccggaaatgtaaatccactcggactttccccttctgttaaggaagctgttgcggctcatgtggacctcttttcttcttatcctgaccgggattataaatcgcttcgcaacacaatcgctgagtactgcgatgttcctgctgatttcatcctgccgggcaacggttcaagcgaactgatttcacttttgattgaaacaagagcaccgaaacgcactctgattcttggtccaacctattctgaatactccagagaactttctttctccggaagtacacaggactattatcatcttcaggaagcggaagattttgaattagatgtagaagatctttgccggactttgttaaacggatatgattttctgattctctgcaatccgaacaatccaacttcttctgccatcttaaaagatgaaatgcgtgcattgctttccttctgtgcaaaccgcgatatctttgtcatgattgatgaaacttatgtagaatttgcaccttccgttcaggaagtaaccgctattccatacacgaaagaattctctaatctcatggtactgcgcggtgtgtccaagttctacgcagctccggggatgcgttttggatacggcattaccggaaataaagagttcttatctcagatgaaagaaaagcagattccatggtccttaaacagccttggagcatatgccggtgagcagatgttcaaagacacttcctacatccgccagacacgtgcattaatcctgacggaacgtgaccggatgtttcttgaattaaaaaagatgtcttctttcaaggtttattttccatatggaaactttatccttgtgaagattttaaaaccagaagtaacttctttcgatgtattcgaagcttgtataaaagaaggacttatgatccgcgactgctcttctttccaatgtctggatggcgaattcatccgcttctgcattatgaaacctgaagacaataaccggctcttaaaagtattgaaaactatttaatgataccagggtcaaaagatctgaaaccaccggtgcttgcacaaaggtctttcttaaaaagcgggagaatctgatctaacgattctcccgcttttcttcttattctttcttttggttttatacttccttgctttttctatgattctacagctgttttctaacaacaagataatcatctccattccgataataaggacattgatagtgctgatttgtcatcagacggatgtaatcatcctcatccatattcttatcacagagataacactcatactcctcgtcataaatataataagtgcatgtttcacagctggttcttgactctttactcaattttctctctccatttcccgcccgttgcaagggcctgtagcattgcattctgttgctgttcgttctatgtgcagctggcaactcttttcttagtatcataccatgtttccatagattgcgtccacttttctgtctaatacaattaccttaaacgcaattaatagcctgtattttttgtgttttatttcttattttctgtatatttaaattatttttaacttttttctgattttctattgacaaatgcctatctgtgagttaatatagaatcaacaaaaggaaacgaaataaaaaacaaaaaggaggacaaaccaccagacacttaatcctttcattaaaattaattttaaagaaacagaggtatagtccaatgggaaggtaaattaaatccttaaaaatctaaagaaagaggtacagaccaccagaaagagtaatttaaaaaacggaaacgatatttaaagagagagaggtagaatccaatgggatagttcattaaatcatcaaacaaataaattgaaagaggtaaattccaatgggacgataagttaaaatccaaaatagataaaagaagaatcgaaagaaggatattccaatgggataattaaatgaaataaaatataaaatcactatttgagataatagtttcagatagatatcaagtaaataaggaggaatattccaatggatggaataacaaagtgaagatccactgtatagcgtaggtgcatacggtggattttcttttgtctctttttcgtggatatcccggataatcaaagggataacaaaaaggggcaaagctttttatgcttccaccccatcacttaaaaatgtttaaagtcttaatacatagtctttttattatctcttcacaaagtactcttcataccatacaaggaacgtatagattgtccatacttttctccagttatcagaatttcctccaacatattcatcaaaaatcgcattgattgcatccacatcaaagaatttctctgcaatatcactgtggaagagacgctgtacgtcttgattgtatctctcatcagccatccagatacgaattggtacgatgaatcctaacttcttacggaatgcaatttcttccggaagaactttcgcagctgccgtacggaatgccaccttattctgctcttcatttactttaaagcgagacggcatacgagatgcgatatcaaaaattcttctatctgtcaacggcatacggatctcaagtccggctgctgtactcatcttatcaacattcaggtaaatatcaccttccagccagatctgaatatctacatcagacatctttgtcaacggatcaagaccttctgtctcctcgtagattcctcgtgcaagttcaatcggcagtacgtctggatcgtatttcttaagaatcttctgcttctcgtcttctttcatgatattggtatttccaacatagaaattcttcagattctcaccataacgttcggcgtttctgtacatattataaccaccgaagaattcgtcagaaccctctccggaataacagatcttcgtatgttctgctgttgcattacatccaagtgtaaatacaatcgcagatgcatctccaagtggttgctccatattgtacataacataaggtacaatatcaaagaactgctccggtgtaatgatacttctggaaaattttcttccaagaagctgtgctgtcttctctgcaagaacagattcatcaaatctctcttcctcatatccacaacagtctgcctgttctgcatcagacattgcaagcacataggaagaatctacaccacctgacaggaatgactccactctctcatctgcggtcttcacttccggcatgatttctttcagagtattatggatctcatcagcccaatcttccagagtcttgctctcatccggatggaattccggtttccagtatctgtgaatctcaagctttccatcctgccagatcagatagcgtcccggtaacagttttttcagtccacggaaaaatgtattttctccggcaacataggtcagacttaaatacagctgaagcatctcttcattcagttctttcttaaatcccggctgatcgataatatcacggatcatcgttccataaagaagctctccatcttctgtctcatagtaatagaatggttttgttccaaactgatctctcagacagaaaagcttctgctcttcctcatcccacagagcaaatgcaaacattccgtgcatatgatctgccatctcacatccccatgtctgatatgccttgatcaaaatctcatgttctctttcttctctggaaagtgtaagatcaattccaagtctctcacaaagttcttcccagttacgaatatgtcctctgtatgtttttacaattatcatctgtttaacctctcttttgtcaccatctttggtttttgaaagttgtttcttctcccgcttatatcctacagatatcgacaactttcacggttcaatcctattctatcacactaactttttcttgtaaattctcaactgtcactcgatacccatctcggtctgaagcatatataacatatgtattttagtcagaatgcatctcaccttcattcgcttcttccatttgtacttcttctgctgcgctacttcctgctatctctgcatcaacataaccaaaacgaattactgcctgtggccagttaaggctgattcttggtttcttccctttctccgcacctgcttttccaatcagatcaagcaattcttccagaactgtttttgtcagataacctccgcgccagtgaaacgtcagaattcttcctttctttgccatctgaagtgctcttttataaacttcttccgtttttgtaaaagacagtttcttttctttataatagaaatgatctccgtccgtacacttcatagccggagcgatcaaaggctcatgatcccggaaaatcgatttatcttccagattgaaataatcataacggatttcttctccgatcgtacagtttcttgtaagtgtattatcaaatgtcgcatctaaatgataatatttctcattaatctgcacgatattccatgtatgacggtatttgattcccttatccggattattcccgcaaatagcgatcatacaccagactccaagctcatcgcacagcactttcaccgcttttgcaatcccctcacatactccgacaccctgtcctaacggaccaataatctcatgtgaataaggtttcttcaatttatcatattttacattctcgcaaatgaaatcatgaatgtatttttctttctctgattctgataatttctgcgccggtcgtgcaagtttctctactctggatttcattgccttctgatgttctttcaccttcgcccggtcaaacaaatattccggcagaaactgaatgttcggcgattcctgataataacgatacttaaatcccgttgcccagaaaatctccggatgatccaggcgcatccggaagaatacattatacagttcttctccgctcatacgcggtacctgaatctccttctccatccgcaagacgccctgacagattgcatgatacgttgcttgctgcatcttattcatcttactataataaaatggttccatacttatcctctccggtcagcagaaaattcttctatctgaacttttcgtttttttcctttcttttcccagatcatcagactgattttgtattggagtgaatctcttgatgcaataaatggttcctcacgaaatagatttatccgaaatccctgttcttctaactctcgtttccgctctgatgctctcttctcagtcttacgattctgattttcttcctcatctgtgaattttcttctcgggtaatttgctgctgccatcttcagttcttccatcaaaagatctgtgacttctgcatgacgcttttcctgcagcatcccggcaatcttttttgcactccgcttccatggatgtttctgataaaactttagacatcttagtaactttttatcttctactgttgccgcaagctcctgcatcacttgatgtgcttctgctgacggtacccacggattttcccttggaactacatattgctctgaaactgccggataacagcaatgattcagcggcggaaagtccgccagcgcagctagtttccgctccgtctgattacagtattttgctcccagataatccagtttatcccgtacgattgcaatcttatattctatctgacgcagatattccgcacctttcacccagaaatgtccgatttctccatagtcatataagtgtacttcttcacttaaatcctcaaaaaaaatcgtaaccacggtctcaccctgatgaactacaaggacataggactcctccggttcttctgttacacttaactccgcttctagttcaccttcataatcctctctatactgacctgtcatccttgcattttcaaagacaagaaagctctctaccgcatcgttcatcaaataaaccagccgcagtttttcttctgtaaaaagcagttcaaactgtccttgttccagcacttctcctagtttcagaaatgcttccggcaattgaatttcactcattttccgctccctcagtgcatttgtcttccaggcactcacgaatcttgtcttctttcaaatcctcaccgatcacgatcagaatctcctgtccttctttgattggatttactgtcatcttctgtgttgtcgcattcagctccatccagtcaccggattgattcttcataaatccttttacacggaacactcttccgatatcattaagatttttattgttttctttttcagaatcatctgtgcatccacgtttaccaaacagctttttcacagccggaaccatttcttcttctgtccgattcagattcataaaatataaggtctggaatccatccttttctgtaccttccggtctgcgaaacgactcaatctgatagctgctgttctgaatctgtgcaaaatcttcctctgtcagcatatcccagtcttttgcgatcacttctttttcaattcttctggtacatccaatgcgttcaagagaacgattgacatgtgaaataattctgttttcctgttcttcacaagcattgtccttatccagcctgctcagcacgatcacacccgcatccgctgcctcagatcccagcaaatattccgcctgatctgacagattttcttccagtcccgcatctacgattgtgatcacacttccgatttcgtaccaccgatccagaggttcttctcttaatccatcaaaaaattcatccacgtcatagattcctgacggctccacgattactctgtcatatccacacattgccatagagatcagctttgtcttgaatcgtctgcggtgtgtctctttatcacaccctccggaaatcatttccagttcacatttttctccctgcagctcctgaagaagcatcatatccacattcaccgcaccgaaatcattttccagaattccgatattcagaccctgacgaagcaggtaggatgcatactcttttataaatgttgtctttcctgcccccagaaaacctgtaattaaatctatctttaccatgattgttcctctcatatctgatatactcgcacaatttactctaactataataccacaatctccttgcatttcaagaattcctcggcattcttctgcgcatctctgtggtcttgccagagactatatcagatggtggattgactccctcatttgttcaagaatgcctctgcaatcctgccggaggctatatcagctgggagatgactcccaccactgatactagcttgtttctcaccacctatagagatgggagtcatctcccagctgatataaatatagagtattgaatccaccgcctgttttccctataataaacttatcaacaataaacgttattttttacgagattttcaacatttttatctcatcaaaacacactttgtgaagataacgcttacgaaacggagaatttattatggaatttcagaagatcagttccccttccctgagggatctgtttattgaacaattagaacatctgattctttccggcaagctacaggttggagagaaacttccgccggaacgccagcttgccgaaatgatgcaggtcagccgtgcggttgtcaacagcgggatcagtgagctggagaagaaaggattcctcaccgtaaaaccccgcagtggaacttatgtagcagatttccgcagaaaagggactctggatacattgattgcgatcatgaattacaacggcggacgcatgcgtgatcaggagattcgttccatcttcgaagtccgcattgcgcttgatacacttgctgcacagctcgccatcgacacgatcagcgacaaaaacatccagcgtctcctcgaattcgttaatcagatccgtgatgcacaggatgtcaccactgccattgaagctgcttacgaattccaacacgagtttgccctaatttccggaaatacattgattccacttattttccaatctttccgagcaccgatttttaatatgtgggaacgttattgtgaactctatgggatagaagaattatatcgaagcaattataagacctggacctatatccgagaccgggatacccaaggagcgattgcatgggttcagcaatccatgcaggactgcattgatggggaacatcagatttactatgaattgtaaatttgtatttagacgtttgaattctgagtaatgaagcaaaaacttttgttggataagggcgtgatgtggactgaatctgagtctatcttctcgtttacgtgcatcaaatcaaaacttgtatgaagtctttcagattcgtcccgttgagcaaacaaatctgtttggaataacgaagcaaggatggtgctatattgttgaggacacatgtaaggcaggagcgttccgaatccaccttgttcagtatgttagtaagagccagacaggcaccactcacggtaactgttctggctcttacgttacatactttcaaggggatgaggtagagcgggccggtgtccgatgcaatatagcatcattcttgcggccttattcaccaccaaatcctttgcttcaatatggagaatcagacagacaaatacaaatttaaacttctgctctcgccattgcttccttataatccttctgatctgtaaagatctcattcttataaggattcttcttctgctgttttgctctcttaataattgcagccagacagatcacattcgctacaagtgcaattaccgcgatcacaccctgcatggttggattagcacttgtcggtcttactgctgcatccatgaatccgtcagaatacagagccggaattactgagaaacggcttgcatcctggaataatgggaatacctgagcaaacatacaccacagtgccagtgtattcgcgcggttctggatccagccacccttgttccagaacatatttgcaaatgtcggagcaagaagcaatgcaacaccacagtagaatgcatgtgttgtcaggttgttatatgtgtactcgaagttccacagatcatatgcaatgataaagcaccatgtcatatccggccaaagcatatcgtcatgcttcttggatgtgtagattccccaccatcctgtcatacagaagatattcaggattccggcaattccgttcacccagttccaccatcctccgtagagccatacattttctgaagacagccaccagcggtcaccgaattctttcattgccatgaatccacggatacctgattcaaaatcacttactactgcaatcagaatattgattgcaacgattgcaaacgggaatactttgaaccattctgtcttaccaattccccatttgtatttcagcatcataaaaccaatacaccctgctgttgcagcatacaattttgcataatggaaccagcttgtcatatgtacataagtatcgttattcagtgcccattctgcaccatttgctgcacagatatagattgcgatgaaatacactgtaagtatagccggaatagctccaaaacagatcagaccaccgatttttgtacgtcttgcgaattcatttgcaagaacaagtccggcaaacaccagtacccaccctaacagctgccagccggcaccatcgccataaatttggaataacataattatccccctccttcttttaattggttataccaacctattgttatctttttaacattatactcttcttattattatgcgtcaataaatgcacctgtttctcctatttttcagcactttataataaaatatctctccgtatttttgtatttttacaatagattcgcgttttggcatctggtatgaccacagccacattattttctttctgacgattcagaaaatttatttaagcattcttatttttgagttatctaacaattcaatattcattttattctgttttatgcgtacttttcttgatttttttcatgtttttgcaagaatacatatatatttcttgcaaattccatctcgactgtttataattacattaaaatgcattatcaagacactagaaaacatatatgtattgtgaggatgaaaactatgaattcaaatgatatattaattgcaaacactgacgatctgcgcagtgatatggactatttagagaaaacacttttgaaaggacaccgcattgatccgaatctttatgaagaatatgatgtaaagcgcggacttcgtgattcaaccggccgaggagttcttaccggactgactgaagtatccgatgtctgtggatttgatgttataaacggacgtaaaattcctgctgaaggtggactttactatcagggaatcaatgtcaatgaccttatcaacggtctgaaaggcaaacgttttggatttgaggagacaactttcctgctccttttcggacgtcttccaaaaaaagatgaattagagcattttctgaaagttttatttgaattagaagatctaagcggacgttttgttcgtgacgttgtcatgaaggcctcaagctctaacatcatgaacgcactccagcgctgtgttcttactttatatacatatgatgagaaccctgaagatatttctgttgaaaatgcactgcgtcaggctcttgaacttattgcaaagcttccactgatcgcagtatattcttatcatgcatacagacatttccgtaaagatgagacacttttgatccgtaatccggagaaaggccgttctcttgccgaaaatattttgtacatgcttcgtccggatggacagtatacagaactagaagccaaggttcttgatgttgcactgattcttcatgcagaacacggcggtggtaacaactccactttcactacacatgttgttacttcttcaggaacagatacatattcagcaattgctgcttccatcggttctctgaaaggacctcgtcatggtggtgcaaacctgaaagcgcaggggatgtttgatgatattaagaagtctgtcaaagactggactaacgaagatgagattcgtgagtatctccgcctgattcttgataaaaaagcctttgataagacgggactgatctatggaatgggacacgcagtctacacaatctccgacccaagagaaaagattttgaagagctatgcacagaagcttgcttctgaaaagggacttgacgatgaattcgcactttatgaccgcgtagaaagaatcgccggtgaagagatcatgacacacagaaagatgctgaaacctgtctgtgctaacgttgacttctacagcggatttgtttatacaatgctgaatattccggaagagcttttcacaccactcttcgcgattgcacgtatcaccgggtggagtgcacatcgtctggaagaactgttaaatgccggtaagatcatccgtccggcatacaaatatgttgggcagcatacagaattccatgaccgtaatgacagaaattaattatttgatacctgattattattctaagttcacctgcatcgccgaccgctgtccgatcacctgctgccaggaatggaagattggcgtcgatgcagatacgaaccgtaaatggaagaaactccaggctccggaaaccgtacctgaacaaaagaaaaatttaagcgcttatacgattaaaaaagatggacagcgtgtgataggcctggacagtgatcatcgctgtccattccttaactctgagaagctctgccgccttgttgttgcttacggcgacaaagtcctatcagaaacgtgcactacatttccacgagaggagcatcgctttccgacacataacgagaaaatgctgatgccttgctgccctgcagtgattgacctgtggaacaaacagaagtccctgcattttccaaatgtatcagacactttgtccgatactggcgatacagatacttctgtccttttcctcttgcgtgaaaaactactcaatcttttagatgattcttccagaacaatcgaagaagaacttttggaaagcttctatattcttcaggaattgtaccagcatcagccattaacaaaagaactgttagaagattatttttctgacaacacagtaagagaacttggaaatgcgatctcagatatagaccttccacctttggatctgatcagtgaatgtaacgaactgttacaagatctttccgtaaactatcaaaaagaagggctctatcaggacactctgaatccaattcttgctttggctgaagaaatatcggaagccctttcggacaatactggaaatcctgatgatactaaagcttacgaatccactttactggaacaatgggaacaattcacacaatacttgagcccttacgaaccactgcttcgcaatttcctgcgcaacgagattttctccgatctcctgcttcctgacagtgacctggaaaatgtactggtacagatgcaatggattgcccttgaatatgcatcaatccgccacagcattttcttaagatggatgctggatggcacagacgcaaacgtttctgaaatttcttacgaaacgttgagacaatatcttgtgatcattacacgaatgaccggatatgaaacagcggatatttatgaatatctggaaaacagtttcgaatccctcttatgggactggggctactttgcattaattataggaaactaaaataggattatgtgattggcacaagtactttttgccttttacataatccttttttcagagttatcacaaactatctcatacaaatgtacacaacatacactgcataaagaagtaacatgataataccttcttttctattaagttctcttttcgtccatgccatgatccatccaataacactgaacacgatcagcactgcaatatcaatgatattttctgtcaaaaatgcgaccggtgaaattgctgccgcaataccaagcaccatgagaatattaaagatattggaaccgattacatttccaagtgccatatccacctcacctttttttgctgctacaatcgatgtaaccagctccggaaggcttgttccaaatgcaactacagtaagaccaatcagagtctgactgattccaattgccgccgcaactgtacaggcaccgtctactacccagtcacttccgaccgcaatcgctactgcgccgagaagaatgtaaatcacactctttcccatagacatttcctgaatctcctctgcttccagaagatactcttcctcttccactcccggctccacatttttctcacgagatgtctgtgctgagcggatcatgtagaggataaacgccaggaataagataataaatacaactccatctatatgtcccagtgacattccggctgcaccaagaatcagaagcaataccgcacacagaatagatatcggaaaatcaatctttaacgtattaatctgaactgccacggaagtaaaaagcgtgcaggctccgactacaaccataagattgaaaatattagatcctaccgcattactgactgcaagtgcattgtttcccgtaactgctgctgtcacactgaccgcagtctccggaaggctcgtccccatcgccacaatcgtcattccgatgatcagtgacggaacatgataccgtcttgcgatactgctacacccctcaacaaatgcatctgcaccttttacaagaaacacaaatccaataattaaaagtaccactgcaaatggcacactttgaaacaaatcactcatcttttatttcctttctgctatactatattcaacctcattttatgctaatccagacagatgctggatcaaaatcctaacacctaaaagcaccaggatgattccaccaaccagttctgccttatgtttatatttcccaccaaaataatttccaatcactacaccaacaatagaaataatcattgtcgtaattccgatgatcgtaattgcctcaagaatcggtgtgtccagaaatgcaaatgtgattccgactgccagcgcatcgatactcgtcgcaacggcaagtacaaacatatttctatgatccaacggctgatcttttacttcaacaatatcttcttcgttccattcttttactgcctccagaatcattttcccaccgataaagccaagcagaataaatgcgatccagtgatcaatacttgtaatatacttttggaactgaattccaagaatccatcccacaagcggcattaatgcctggaaccctccaaaatacaatccgatcactaccgcctgtttcttattcagcttcttcattccaaggcccttacagacagacactgcgaatgcatccatcgcaagcccgacccccatcaacaaaagctcgataaatagtgccatgtttctcctcttttcttttttcttctgtatctgttccgctacaattgcagtgcgcatcctaagcggagcgttttttatatattaggaaaggactttcctaatatataaaaacaaagagacccacgtatgttctatgataagagaactgcttgcttgacataacaaactcgtcctcttatttaaaacatacatgagtctcattctttaagatttgccaggtgatcttttaaaactcattctcaccggtatgttgacaaatcacattttcatgcgaactactccctcacggaatatatttaatttatctttcggctcggttcgtctcatgaacaactgcctcactgacacatcgtttcttactataacgaatgaattctgttttgtcaataaattttatcatttatttccagacgatttattccgagacatttcgttactgtcacagtaacagctttccccattagaaaagcagcattccgattcctctcgtgatgattgccacaacccatgcgatcagacactgccagaataccattccgacagcccattttgcaccaagctcacgctttactgatgcgaccgctgcaacacacggtgtataaagcagactgaatacaagcaaaacacctgctgacaatggagtcagtacggatgcaattccacctccgaacaatacctcaagtgtagatactacactttctttcgccataaacccactgatcagtgctgtacagattctccagtctcccagtccaagcggacgaaggattggaacaagtgcacctgctatcatagcaagaatactatctgctgaattctccacaaggttcagatgcaagtcaaaactctgcaagaaccatacaacaatcgttgccatcagaataactgtaaatgctttctgtaagaaatctttcgctttctcccaaagaagctgtgccacattcttcgcacccggcagacgataattcggaagttccataacaaatggtaccggttctcctttaaacagagttcctcgataaaggaatgcgattaaaattccaactacaattccaagcacgtacagacccgacatgatcagtccgcccttacccgggaaaaatgtacttacgaagaatgcataaatcggaagttttgctgtacagctcataaacggtgtcagaaggaccgtcatcttacggtctctttcactggtcaatgttcttgttgccataactgccggaactgtacatccgaatccgatcaacatcggcacaatgcttcgaccggaaagaccgatcttacgaagcagtttatccattacaaatgccacacgcgcgatatatccactgtcttccatcatagagaggaagaagaacaaagtaacgataatcggaagaaaactaagcacgcttcctactcctgtaaagattccgtcgatcacaagacttcggattgcatcatttacattgagtgcgatcagtcctgtctcagccattcttgacaactgatcaattcccatttccagaattccttgcagaaatgcaccgattacattaaatgtcaaataaaatacaagcaccatgatcccgataaagcatgggatcgctgtatattttcctgtcaagattttgtctatcttctcacttctgacacgttctttactctctttcggttttacaaccgtctgctcacagagacgttcaataaaatcgaatcgcatatctgcgattgccgcacttcggtcaacctcacgttccgtctccatctgctgtacaatatgctcaagcatatccaactcattctgatcaagctttaactgttctaagatcagcggatccccctcgattgccttcgttgcggcaaaacgtaccggaagctttgcttcttctgcatggtcttcaatcagatgaatcactgcatggatacatctgtggaccgcaccgtcatgatcacttttatcacagaaatcctgacgcagcggacgctcttggtattttgccacatgaagtgcatgacgtattacttcatccacaccttcgttcttcgctgccgaaatcggaataaccggaactccaagcagtgcttccattgtattcacatcgatagatccatgatttccaatcacctcatccatcatattcaaagctactaccatcgggatatccatttcaagaagttgcattgtcagatagagatttcgctcaatattcgttgcatccacaatattgatgattgctttcggatgttcattcaacacaaaatttcttgaaacaatctcctcactgctgtatggagacattgaataaattcccggaaggtctgtcacattcgtatttggataacctttgattgttccatccttacggtctactgttactcctgggaagtttcctacatgctgatttgctcctgttagctgattaaacaacgttgtctttccacagttctgatttcctaccagggcataagtaagcactgttccatccggtaatggattagcatcttcttcagaatgatactttccttcttctccaagtcccggatgatctaccggtttcaaacgttctccacgggaatggctgtttgttctctcgctgatttcctcaacttcaatctgttctgcctctgcaagacgaagtgtcagttcatatccatgtacctgcaattccatcgggtctcccatcggtgcaaactttaccaccgtaacttccgcacccggaatcatacccatatccaaaaaatgctgtcgtaacgcaccggaagccccaactgtcctgatcacagcactctttccaatcgctaattcttttaatgtcatttttttatcatcctctttagcttattgcgattttttatcaattagttatacaaaactagcttattccaggatgttggatttgtcaataattatcatttacaaaatgctgtaataaaaaaagaaatgctttattccctcttatattttgggaaataaagcatttcttttttcattatatagcagcctctcgttttttcagtggcgcataaacgattcttctgacaaaaataaagcaaatcacctgcaggatgatcgtaatgatccaggataccggataggaaataaacaaaatcttcaatgatctgaatcttggaaatattccaaagatccagacgattctcgttccgactgttccgattacggaaagtatcatcggcacaattgattttcccattccacgaagagatcccgggaacagatccatccatccgcacagaaaataagtaactgttgtatatagaagaatctccataccacagctgataacctgaggatcatcagtataaatcttcaaaagctccggtccaaagagatacgcacctccaccaagaattaatgcaatcgttgtggaaagaatcaggcagtcaactaagactctgtccattcgtttccattttccgactccgtaattctggcttgtaaaactcatacatgcctgtgtcactgcattgatcgatgcatataaaaatccaaaaatgttattcgctgccgtatatcctgccatcgccacggatccgaaagaattgaccgatgactgcagaagtacatttgagaaattgatcacagtactctgaattcctgccggaattccaacctgaaagatctgtcctaaatatactttttttatcattagcttcgagaagcgaagctgataactgctgtctgatttatacaggcaacgcaataccaatacacacgatacaaactgtgctgttaccgttgcaattgcaacgcccgctactcctaaatgaaaagcaattacaagtaaaagatttaaacatgcgttaatcacacctgctacaatcaaaaacaaaagtggtcgtttcgtatctccaaccgctcttaagattgccgctccgtaattatataacataaaaaacggcattcccaggaaatagatcttcatatatagtgtcgaaagattgatcacattatccggtgttcccatcaactcaagtgctcctctggaaaagaacaatccaactaatgccatcacaactccgcttataatcgcaaatgtaatcgctgtgtgcaccgtctccgacatctctttctcgcgccctgccgcatagaacctggctgcaagcacatttgctccaagagatattcctataaataggttcgtaaatacattgatcagtgctgtggttgatccgactgctgccagtgactcacttccactgaatcttcctaccacaacaatatccactgcgttaaatgcaagctgcagaattccagatatcatcagcggaattgaaaaagaaatcagcttattcatgatcgagccattgcacatatcaatttcaaatctgtttttcttcttttctgaatgcataacttttcctcattctataaattattgtaactgttcaaacactctcttaatgctgtcataatgaaggaagattccctccttggcaaagttttcaatctcctccttagttgcgaacatatatccatctgtttcttctgtctgaagtttcagatcattctcatcaatatcaagcacaaagcgatatacatcaacaaaataattatcaccctcgcccggattttctcgcttataagtaaatacatatccgccttctgcattagaaatatctaatcctgtctcttctctcacttcacggcataccgcttcctcagaagactctcctgcctgcgctgcaccgccggatacttcccaccaacccggtgcccacgcttttgtcattacacgtttcgtgatcagatatgttccatccggtcttgccacaactccaagcactgtcagatggtattctccatcctttaagcaccagtcatttcgcttcattgttcttccggtcggccgtttctctgcatcataaatatcccaatactccatgatattttctcctcgtcttatctatctcacatttttcatttccctttcttatcatacatttttagaaaaaagctgtaaagtctttggcaaatattttccattagactttacagctttcactatcattcgttatttacttctatctcagataatatgtcatttcatgccattcttctccaccccagacagaatctgacattcccagatctacaaacccaaatcttttatacatctctactttttcatccaggcaggtaagaacaatttcttttcttcccttttcttcttctctttgcagataacatcttacaatctctcgtgccagaccttgtcctcgatactccggtaatacatctaagccaaggatcataactttctttccttttggattattcaaagatgcatctgtaaaaaattcatctcggaatttttcctcgtccgttgcaattccattcaaaaatcctgctaacttcccagttgttttatctaccgcaactaaaaacaattctggagtcacaccgattcgctccttcatgtgtttctcagaacatgcttcatttggcggaaaacaaattttctcaatcaagactgcctgatctgcctcttcctgtctaatatccctgaattcaaatctttctaaaatactactgttcacttcaatctgtccttgcattttctaatctccttcttcatcaacttttgtaataacatatttgtaatttcacactgtcaccgtaagcactgctcctacagatgctaccaacgacgctgctactgctaatatctggaacggcaaactaccaagtcttccgcaaatcaggctagttcccgcacgtcttctggaacgattgtatgcaacaatcactcctactccggtcagaacctggaccacacttgccattcttgtaaatcctacaaagctctgcactcccataagtgcgatcacaagacaaggtactgtagctgcaagccagctgatcttttcgccccatttcgtctgttcattcacaatatctcgaagattcagtgtattcgcccagaaagatgttgcaagagccagcaaggaaaatacatatccgataatgctgacccatccgccaagatggccggaaagatccaccagtgctccattctctgtcacattagaacatcccagaagcgtcataaatgtgatcaaaagaatcagtcccatattcaagcccgtgccggctgcaatcgctctgcgaatgcctttttcgtctccttctaaacctttcacaacctgcggcacagacataacagcagataatgaaaatgcaatcatgctataaagtgccagcatattgttattcgaatagaactttgtcgaaagctctgttgtctctgaaagcatcgttgctacaaaaaggatccctatgactccaaacatggaaatcactgcaattttctcacaaattccaaccagtttcattccgatatagaccacacttgctgccaatacataaaagagcagcattccggccactgacggaaggtgaaaccatgcagaaaatactgctgccgcacctgtgataaatccactcacattcactacaaccgaaaagccaagcagcccaaacgccagccatgtacatgccatcttcagctttcccacaaacagctcattttcaaagcatttgataaactgcgcgccattgttattcaaagacagttccgcaatcataaaatgcaatagcagattcatacaatatgccactgccgcaatccagatgatatcatgccagttattcctggatgcaaggaatggaaccgaaagaattcccgatcccacaccgtgtcctatgataatactcgtcgactctaaaaaagtcagcttcgattccccatgtactttcgccatacctacgcctctccagtaataccaatttgttgtttacctcttatgatgacggaaaacaatctcaaatctgatatgataactctttctattgtacctcattatagcttataattaaacccatttttaaagagctttttcccaggcattttatattctccagaaactatgcagttaatcatgttttatgttatactcttaatagaaatagctattaaatctaaacgaaaaacagaggtaactatcatggaattcaaaagcattttaataaaggacacaactgtagaagaaagaaaacagatcgtgaaagaatctttaggcaacatttctgcaaactgcgacggttgcatggcaagactttcagaaatgtacgatgagtatatcgaaggtaaaaaagagatccgtgacattaatatggaatttaatgggcactatttacgcggagacatggacaaaggagaaaaaagaagctgtccaatgtaaagtaaatctactccccttttaaccttcactcaagacctactgatagaatggaggtgtttgtatgaaatttaagaaaagaatcgcatttttcacagcaattatgatggcactattgactgtcggatgtggcagcaaatcaatgtcagcatccgaggacagtgcaaccaaggaatcagtctacggtacagattattcagaaaacgaatactgcgaagaacctgcagaaacagccgatgcaggagtcgcttccggaaatggactggaagctcaggtagaaaacggacgaaaactgatccgaacggtttctctttctttgcagacaaaagaatttgattctgtactcaatagcctaaaaacaaaaactactgaactaggtggctatgtcgagaattcttctatcagtggcaatagttattcttatacaacaacccgatatgcaagctacaccatacgaattccggcagacaagttaaatgagtttgtggatatcgttggtgaacttggaaatgtaacacaggaaaatgaatccgtggaagatgtgacacttcagtatgtagatgtcgaaagtcataaaaaagctttagaaacggaacaggcacgtttgatggagctgctttctacagcagaaaatatggaagacctcttagccattgaaagtaaattatccgatatccgatatgaaatagaaagctacgaaagtcaacttagacttctggacaatcagattgattacagcacagtgcatgtggagatatttgaagtcgaacgtatgacagacgcgggtgagaaaggcttctttgaagaaatcaaagaacgattcggagacaacctgtataaagtaggtcacggtttcaggaatctcatcattggaattcttggtgcattaccgatccttatcgtatgtgcagcagtcatagctgttatcgtagttatagttaagaaaagcatcaaaaaaataacattcaaaaaacagaaaaaagcaaaagaaaacgatcatgaagaaaacttcaaatagcgactctccttcgtttctcttgtaaagcaaagcactcaaaagcggaaaacctctgaatctaatgagattttccgctttttgttttcctcttattctctattcttttttatatttttttccattgcagcaatttcctctgccgtatattcttccaccactgtctttgtcacttgttttatatttttttccttcagacgaagatatacaaattccctgaaaatagtgtacagaaccgaaactaatggaataaaaataagcattcctacgattcccatgagattgccaccgatcgtaacagcagcaagtacccagattgacggaagcccgacagagccaccaaccacatgcggataaatcagattgccttcaatctgctgaagaatcaaaaatacaataatgaataaaattgcttgcttaggacttatcataaaaatcaaaaagcaacccactgcacatccgataaaagctccaaagatcggaatcaatgcagtaaatgcaattaaagttccgatcaaaagtgcatatggcatttttaaaatactgagtgtaacgacaaacatacttccgagaatcacagcttctacacactgccccgtaagaaaatttgcaaatgtctgataggtcagagaacaaattttcaggaatgcctctgctttttgtttcggaataaatgcgaaaaatacttttcttatctgtacatgcaatttttctttctgaaaaagaatgtagcatgcaaaagaaaatgcaatgaaaaatgtagcaaatccactgacgatagagcccactgccgacattgtcgtattcatcatatttcctgctccgctgccaagaatactgattccccatttaatggcctgatcttgattaaactgaacctgatttacaagcttcataatttcttgattattgtgtgaaaaatctcgaatccagttttgcatctgtggaacaaaattcgcaatacttatcatcaaacttcccattgtccgagtaagctgtggaatcacaccaaacattactagtgcgatcacaccaaccgccaatataattgtgagaagaagactgatcggtcttgctaacttttttcccaccttattttcatcttttgtcttaccgaaaattttcttttctaaaaagctcattggcacattgattacaaaagcaattgcgccaccaaatacaaatggaaatataattccccatattgttttcagtacatcgatcactacttcaaatttccacaatgcaactacaagcagcactgtaaaaataatcagttctcgaattttcttcatagataacttactcaaatccattatcgttctcctaatttcttaaaatcagccaactatacttttatgcaacaagatatttttcatcatatacttaaaataatattgatgtcaagacgctttatcaattcagcttggcattgtatccgtcttatgataatgttattgatgaacgttatgcaacgaataaatatcagatattgaaaaataaaacctgaaaaaatcgaaataacgaaatttatacgaaaagagaaacaagaaaatgtcacaaaaacaaaacaaattgactcaaaccggtattgtagcacttcttgcttgtgtatgctgtatcctgtggggaagtgcaatcccggtgattaagacagggtatcactttctgcaggtagattcttcagacactgcaagccagattgtatttgccggaatccgctttactttagctgggattctggtattaatttttgcatcaatcagggaaaagaaagtgatgcttcctgataggacactcctcaaatatgccattcctgtgtgtcttgcccagacagtggggcaatacttctttttttacataggagttgcacacacttccggagtaaaaggtggaatcatcaccgggcttggaaattttattgcaatcttgttgtcttgtctggtatttcgaaatgaacggatgacgagccaaaaaatcgcaggatgtgtattgggatttgcaggagttgtagtaatcaatctgatgggaaattccctggatatgggatttaaactgatcggagaaggatttattctgattgcacaattatcttatggaatgtctactgtgttgatcaatcttttttccaaaaaagtatcaccggtagtgttaagcggaacccagttcacgatgggcggaattgttctgactttaattggaattggaatggacggacacctgggaaatgtaacggccggaggtctggcaattatattttaccttgcgatggtttcagcagtggcatatacgctctggtctatactgcttgcatggaatgatgtttccaaagttgcgattttcggattcgtaaatccactttgcagcgtgatcttatcggcactgatactcggagaggtaaaacaggcatttaatgttggcagcctggttgcattagttttggtatgcgccggtatttatatcgttaatcgcagaaaaaattaagcattgttattttgaataatcccttcataacctgctttaaggaaaagatcaaaacaagtatggaatctgcaccattcttcatcagattttcctaaatgttttctgcacatttccagacatcccattatttgaacggttagtaaatcagttagtgtggattcatctaaacttgtcttatccagcataacatcaagaaaatcctgtttaagtgcaacaactgtatgttttactgccggcaggaacaatgcttctgaaaaaaagaggggctgatatttcggattttcccgtaaaagccaacagagccccttcctgacaattgtatttgaattcgatgcattttctgatagcaacgccatatttttaatatcacataatgcatctgaaaaaacttcttcaacaacttgtccaatgttaccaaaatgagtataaaatgtccctcggctgacacctgcatatttacaaagatctgttatggttatttgcatatagtcctttttcaaaagaagctgcagaaatgcatctttaatcgaattatgtataaaattgtctttagataaaattgctttttcttccttcatgtatttccaaaaaccccgctatacataaataattatagtatattttcacataaaaataaagttgtttttcataaaaatgaggcgttttgaacaattgtctcttctttgttcaaacgtatccggagggaattggtttccggatttatttatgttatgttgggtatataagaagcgtgtatataaaaatagaaggaggtaggtattctatgggagaaacattatacacaataggaacggatcagcaacaggcatggatgaaaaaaaactgttttccacctagaggatacggttactctgaaccgggaacatattctctcgatgctacagaagttgcagcatacaatgtcgcgaagtcattttatcaagtctatccggaagtttggaatatcgattatattgaaaaagaaaccggaatcaaacccgatgatatcaaggatcgattaaaacgaatgtatgatgaacatcttatcatgttcgttatgaatccaaatgttggtgtttacggttggggactttattattgggttgtcaaattaaaagacggtacagatccaaaggtaaaagctgaatttgccaaatggtatcagaataaagatgatatttgtacaggatatctcgcagagggcgatttcgatttctttaacggaaatcacatgagagttctggacaatcttcttgcagatgttatccagccatggaaagacagaccggaggttgaatatgtacatctttgtccaatcagggcagatgtcagagaatcacttgtaaatcaatgggatgttccggaagacagatacagaaaatttatttttggggaagaacagaagaagaaattccttaaagttcagaacaaaatagataaaaaagattttgctattatcgaagctcttaacagtacaaaatcaatcgcagatatgtttgattttgacatactggagaagttatccggcctggatggcaagcagatgaaaaaagacattgtaatgtgtgttgatgaacgaaaatttatgctgccaatgatttatattaattacagagcacttggaatatcaatgcatatgtatctggttcgtatgttccagaatgttccgagttacaggaaggcagaaatcgtagatgaattctcacttatgccagaatttgtagacattcttcagttcggtgattctttctacgattgtatgctgactgtttatactgaggtaaatgacgtcgaagcaatcagaagaatgttggaaggatacgctgagattgaagaagtaaaggtagcaaattcaaagagacagttcagacgttgggtagcccgtcttgatgatgataacggatattgggaagaatgcgttatgacggatgactttttacagaacagactggaatccggttccgtaaaatgtcgtttctcaactgactcagaggaggtgcagtaatatgatcgtaaaacatccaagagaatatgttgttgataaacttcaatatgcattaaatccaaaaacgattgccgtagtcggagccagccgttattctacaaaagtcggctataaagttgttgatggccttttaacatggggatataaaggaaagatttatcctgtaaatccaagagcagataaagttgccggatttacagcttataagactgtaaaggatattcctgatgaaatcgatcttgcttttcttgctgtacctgcacacattgttaaatctgttttggaagattgtgttgaaaagaaagttaagattgttgttattgccacaagtgcatttaaagaaatcggacgtggaacactgcaggatgaactcactcaatattgtcgtgatcatgagttgcctctgattggaccaaaccttgtaggaatgggaagtccataccttaatttcaactgcggatttatcccttatcttccaatcaaaggtcctgtagcaatgatttctcagtcaggtgccaacttgcttgcggcacttggaacctcacagaaagatcattttggaatgagcttcttcgtaggacttggaaataaagctgacgttgatttctgcgagtttatatcctacgccggaagagatgaaaacagtaaatgtcttgcaatttatattgaaggactggatagtcctgatgcatttattgaagcctgtcgcagtgttgataaaccaatcgtaacaataaaagtcggtggttcaaagattggtgaaaaagcagcatttgcacatactgcttctgaaaacaaaggaacaaatgatgcattttatgatgatatttttgaaaaggctggagctatccgtgcgaccacatggcaggaatttctcgatatatcaatggcattaggaatgcagcctgcaccaaagggtgacaatatcgttatgattaccaacggtggtggttcgggtcttctcagctgtgatcactttgaacgtcggggaatgccaatgcatgagctggcagagatctctcctaatctagcaggaagaatccgtgcatatatgccaatgtttggttctccgcttaatcctgttgatatttctggaacagcttcacctgttcagtataaaggtgcattcacacaggtaatgcgtgacccgaatgtacatggaatacttggatccatctgtccgacagcagtaacagatgttccggctgtaacagatctggttatcgatatttacgagacatataagcatcttggaaaaccgttcattatggaatgccagggtggtgaagaatgtcaggaagctatcatgaagttgagagatcatggaatcccagcttatccgactgctgaacaagccgtaaatgctatggtcgctctctacaaatatggccagattaaaaataagaaataaattatgagcagacattcagattatgacagaagttgtataaacgactacttctcttctataaaaagctcttataagaaaatgacacctcatttaggggtgtcattttcaatagctttattttctttgtattaaaatcttatccgatctgcggtaaagtcatcaactgatacatatcattttcctctatatcaaatccgaaaacatccagattctgatgcattcgttcaccggaagaagattttggcaacggcagcacaccgcactgcagagcaaatctgatacagatctgtgcgacagatacctgatatttttctgcaagttccataagaaatggttccttgagaactctggctcgacctatcgggctccatgcctctatctgaatacccatctgtttacagaaatcgactgcagccttctgtatatatcccggatggaattctaactgattcaccataggagtaatgcttgtccgctctaacagattatttaaatgatgtggcagaaaattgctgacaccgattgcccgtacctttttcgacttatagagatcttccagtgctttccatgtctccacatccaaatctctccactctgcattcagatcagaaggtcttggccagtggatcagatagagatccaaatagtctgtacctaatcttttacagctgttttcgaactcctgcaaagttgaatcgtatccaagctgatctttccatacctttgatgtcaggaaaaattcttctcgtggaattccactctcgcgcacagcttttcctactgcttcttcattgaaataaaaggctgccgtatcaagatggcgatacccatgtcggattgcttcacttataattgcttcatcggtgttgtctgcggctttataggttccaaaccccactgctgggatttccactccattagctaatgtaaatgtatgtctcatatgatgcttctctttcttgttatatagatgctgcgaatattattcaaacttgacaattactaatcaattttgtttagagattatttattgccgtgttcgcttttctttcaattatttgatttatccatattatcctgcctatacgggttaatgttatcaatttgttatcggtattgataacactcgctccgtagctgtggataatagcaatatattccgattcagattataagcggttttgcttaggaaatcaaccagaaaaatcacttgccggcagataaatttctgccgacaagcgatttttattttttcaattaaaatcctgtcaatctgaaaaacatcaattcatttgctgatccgtcgtctcgttcctgtgtcagcataattaacagagagccgtcatctaaaagctgcatatcttccagccatggataactgacaccaaatatgtcctctgtagaaattgcacctacgtgcgttccatcttttgcccaaaattgtatttcacgcatatttccatctgcagccacaaaaccattttctgtttccgccatgcctgtaatggaaccgagcctgtccggagaactgatatcttctccacctaatttcaaaagctgattgccatcataatcatagacaacaatttttgtgccttcatcttccacagccatggagccggcaaccataatatgactattcgtgatctgtacgtcatctatcatagaaaacagtcccttgcgttcttcatcgttatttaatccggtcagtatccacggttctgtcgttaggttaccgccttgattcgcaatcttctgagtatcactgttcacccagaaactgattccccattctccggatggatgcatattcagatctccgtctactgttgtctgaagtgcctttttcccatcttttacgccaattacatctccaattccaggcgaaagatataacattccactgctgtccccagacaaatattcaaaatcatcgtctaattccatcgaagatacgaattcaagtccactttctgaatattcataagtatccagtttgttctccagcaaatggaacacttgattgccctgttttacaaactgatgatccataatctgcataactccctgtgcttctttaaatgggatatattccggaacgattgtataagaacctatcatctgctctgccaatacaggttcaagaggctctccctcccatggccatggtgcgtctttatttccttcatcctctaatttcagcacaattccttccagcaattctttgtcagaatcatctatttcctgtccttttactctgatatcataggatgtgccagactgttcataacgatacatatacgttttttctatggaattactttccggcattgctgtatattctgcatttcctattgttacagtgtccatttttccttcagcatatgcctctaaatccactccaaaggcaattaaactctttcgatatgtatatgaatcctccttggtcgcttctatagaaatgacattctcggatccatctgctgtatctccatcaaaaaatctaacgtaagaatattcttcatctttcttcatattctctttatcgtagttccatgcctttggataatacactgtaaataaacttaatttaagactttctctgtctttaaattctgtttcttcctgctctgctttttccgattttttcttctccggattctttttttgtccacatgccgctatcatcatcatgcatatcatgatacacagcacacaccacagtttctttttcatggcgtcttccctcctttcatgatttccacatccttttcagttattcactgtcactttttacacagtggaatgtgtagtagtcatcatcatcactgtagtctactttcaaagtaccatcgtcatttatcatcactgtaagaaatggattttctgattcaatcgaacaatatcccagtgcaactgaccatgggaaagtcccaatctcctcccctttataaataactgttacattacggtcacttttgaaatcaagacgcagtgcatcattgatgttgtctactccttccatagaagtctgaggtccgtctcctaaaagttcttccacgctttctgcagcccactcacctatgactgcattttcctcctctgtcagatagagtgccggatccattgcatccgttccatcctttgcaaaaatcacctttactcccatctcgagcatattatcaaaagaaataatatcttttccgatgattcccaccatctcttctccttcgatgctcaagataaactgatcatcttcgacagaccattttccattcccggtagtgtctccaactgaaaaggaaacttttccgttgtttttcacttcaaattcaaaagcacctccgaaagtttcatctatactgacggacattcctatcatctgagcggacaccgctacccatttcccttcatacgggttcttttctcctgtttctccggaacctccacaaccagtcaatactatcatactgatgataagcactagtccaaataacaaattcaacttttttctcataatcttctcccctttcaattacttattatttgcaaaaaatggagtcagcaattctgctaccttactgattggcattgtctgcaagatcacctttcccggtcctttcacaacggtattaaaaatgccttctcctccaatcagcatattttttactccttttacagctacaacatccatagtgcaggtttcttccattgccgctaagtaccccgtactgatcaaaatctcctgtcctgcactcaaatcatactccactgcatgtccatcaatttctacaaatgcggttccatttccgctcaatctctgcataatgaaaccttctcctccaaatatgcctttccctaattttttctgaaaatgcatggacaattctacgccttcttctgaagcaaggaatgcactcttctgcacgatcatggagtgaccgttgctaatctctagtgctttgatcgctcccggaaaacttgatgcaaatgcaatcgttccgtctgcaccttctgcggtatatctgttttgaaacacagaatcaccagacatcagtctgccgaacattttcttcattccgcctccggaaatcgtctccattttcatgttcgggctcatccagctcatacttccgctttctgtgatcatagattctcctgctgataattcacatacaacaactggtaaatttcctcctaaaatctcatattttttcataacaaagttctcctttctttttcatttttcttttttgttttcatcctacaacagtacctttttcattaagctttgtagcacattgcacacacatatccagatcatcacagattaaaaagcaatggtcacatacaagacgcttacatatcggacaaatattaaagatctctttcgcctgattcaatgctttttgaaatgctaaattcttttcccggtcataaagcgtatcataaataatcttccgattttcattttccggttttttccccgctctggaaaaacgaattggtgtacttttccatactgttttacattccatgcagcatagtgaaaagcaaaactcatccggcgtagaacaatctattaaatcctttttcgtaatatattccacatttttaacctccttcttaacctctttgctctatctccatcctattctctgttttccctccttatccattgcctttatttttttctctgatcgggaggccgctatttcgtaataaaagcgtagcagattccgaaagcaaatactatggtcgccattcgtatattattcttattcaccaaaatacgaatgattagtatactatatatagtatgttatttttatttatccactatatatgtaatgtctttttgtaaaaatgcaaaagatgtctgacggttaaactaaaaaaagagcctgtaaagactctttttcgtttactcagttctgctatatgtcagcttatctaactgattacattttcgaaataactcaatatacagcattaattcctctctgacagttatccccagttttcgattcatatttgtattatgctttctcgctgttccaatactgatataaagcaaagaagcaatctcctgtatcgtgtatccatcaacataatactgaagaaccatcctctctgacggagtcagagtttccacgcgcaaagcaaacgccttgagcatttcttctatattcggaggaatgccgccattttccagtttctctgtatttctttttttctgcataaaatcaatcagggcatccacttctgaaattcctgataagttttcgtccgtcaatgcatcctcctgcagtgcttttaagctccgcagaatcggctttacaaaacgccgggacatactgacagaaacaatcaataataaaatcaggaacaacaacgtaccgatgatccagtcccttcgattgtccgctgttaatttttcataattcgcttctgatattaatgtcagtaccgcaagcggcataccattacaactcttcaatccaagcagttcatgcctgcctatataattcccgaaagcggtagaatatgtattataatgctttcctttcttcactgtcatcgttcctgatggtgaaagatacgtttcttttgtatctccaaacatcgccttatccagatagatgtttccttcttcgtccataggagccagtactgtcactatattcccacaggaaccttccaccataggataagacagcctgaaatacagattactcatctccataccacacaaaccacgtacttttccggtactgtctaaaaccggcacatataaaagctgcacatcctcccatgtatcactcagctccagacgatctgtccacagacagctctctaccagccggtttccatcaaatttcataatctgttcataacctggcaatgcggacgtatcaaactctaaattccaacggttatggagctgtatctgctctgctcttgcaatatcagcatttcccctgaaaaaaactacgtgctgtttgcttgtatttactgcctttaaatcagacagccgcaggtaaattcccatgcgggatgtatctgcatattccgttttcgtatttaccgttgcatccaatagggcaaaaactccactgcaatacttcacgtccaatgccgatttcaaagagggatacaacgcagcctccaaatccataatcaactgaggattatcattcaaatctgaaaatgtctttccattggctgtcaggcattgattcaattcttttgtaatgtcttccgataaagaaatacttctcgccatcataatatcagtctgctctgtcatagttgacaacgtatttttctgctgggcagacaacatttctcgtactttaaaatccattcccggaaggactcccaaaatactgagtaatagaactgtcactaaaaaaagtgttaaaatcaccacgcaccaataaacaatcagtctttgctgcatacggatgctttgtctctttattccttttataatcttccagaaatttattttcttttctcccatatgtcagccacctctttttgccgatccggcagacattattgtgtgtatgctgctttgaaatcctctaatgtctctgaaacaagtttatccatatcttccgggtcttccagccactccaaccgctttactgacaagatttgcctgataagttcttcaaactttgtttccagatacagataggaatccaattgcggagcagtataaaatgtataattctcctgcgtctttaaaaaagcctgataaagtgatacatacatcggatcacttaacttctcgatcgcctccggaaggtaaatattgaaagcctcctgctttaccggcatatatccaagactggtcacaaattctacattcttttgggcttctgtcagccatttaagaaacgtaatacaggccttttctttttccggtgtagattttactgtgcaaatgccggcgcctcgctgcataaccatcgtttctcctctggaaaatacgggacatggcatagaaacaatctctattttttctgatgtgttatccgcataagtaacctcgtcagaataatataacacactggctgacgaagccaccgatacaatcgaatctcccgttcgcaaaggttccgttgcataaccactgcgaagccatactcctccggacagtgccgcttttgcataaggttcccatactgtttgaaattccggtccgaaagccagattttctcccttaaaaaaattttcacccagagattctacacctacctgaaaatagttaaaatgataatcatgaacgaaaaaattctttccatcatcaggaatgtccggcgtctggttatctgtccatgcagcatattgttctgccattgcgaagagtccttcccatgtttttaaatcttccatcttcgctcctgtttctttcgcaaaacgatcaaatgctgttttattgataaacataacttccgttgattttgctaccggcaaaatagaaagtctttcatgaatgacaccttcttccaaaaaggccggaataaattcgttcaattcttcttctgtaaaataatcataataatctacaagttccgtatcatccggcatcgccagaactgttttaggataggaaacaaacatatccggcagtttggaagctcccggatctccaaatgcggatgccagtacattttcatgtatcgtattcgtatttgtaacactgccaacctgtacccggatattttcctcttttccaatcgtttcattaaattcatcaatcagatcgtttaatggcgattctgtctgtcctccatatacatgccacaatgtaacggttactggatcttcttttttcttctgcccacaccctgtaaaaactataaccgcaatcattaccaggaataggcagattcttctcataatacatctcatattatttttctcctttccagacagtgtcttataaacaatctgacatctcaacaaggaacagaaccataggtttgatacacttttacatagtatatgatatcggttttcagagtcttaagcactccccatatgggtagtaaaatgctatttttaaaatccatttataatcagatttttctttgtaacagctaccgccaatttcgttttggaatcaaaattcgttttctgcagcatatttttgatatgccattttacagtctccggtgatatacacaaactttctgcaatttttttataggattccccttccaccactaatcgcagaactgctaattccccaggtgtaaaatcacagcttttcgccgttccgatcatcacaaccggcggagtatccggatacacgctctcccctttcatcgtacgatccataacctccaacagttcttctttaccggcatctttataccaaaaactttctactcccgctttgcgcgccctgtcaataaaactgcactctactaaagaagtcacgataattacttttatctggggcattgtctttttaatcttctccgctgccacaagaccactctcatcattctccgtacagacatccatcaagacaagttcacacctgctctgtctgcatacggtttctgccatagctgcgtttgtgatagaagccgccagacaatatctcccactggactgaatataattttccatatcttcccgagccatacgctggtcttccacgattagtacccgtatcatctccgcacctcctttggtatcttaacgattattgaaaattttgactccgcacaaattctcaatgtacctccacattgctccaccctttttcgtataccggataatcctcctccttctttgacatccttctccgttgtttgtccattatctgtaatcaccataatccattcttgttccccactactgcattttacatacagttcgcttgcccctgcatggcgaacacagttggaaagtgcctccaaaagtattatatccatcagctcagaaatatgagattcccagactttttctcctatataaatgattttcacacccaaaatctccgctctttcctgcacctgcctgtgcagttgttcgccttccacagactcgttatctttattcagcaagtctaatgtctgcttccattgcgaaaggaaaacatcccggtctgcttccgattcgcgcagcaacatccgctgtgccgccaggacgctatatcccagattatcatgcactctcattttcatagataacatttcttcttctctggtcagcattattacattcttagaaagttctttcatagccacagacatttcctgaagtttctgattttcttccttcagcaacactttgttccgatataattccgacacttcagaagcaagaacttgaaaaaaatgatctccggctgtcgtaataatctctttctctgaaaatttccacacacttccatccgcaaagcagtatactttcaaatcaacatcataaaatacattttccttcagaggatgtcccagtgcttcctccagttctgtaatattctgtatatctcttcccgccagattctgacaaatttgatacatttttcgattcatcagtttaggcattccgttcccatcaaaaaaaacaattccactcggcaaattatccagactttcctgaactgcattttccctcaggcagctcttgcggtacttataaattccaaaaatcttcaatcccacatataaaaaaacaccaattcctataacaattaaaatcacatacggtattttaaataatatcatggaatcttcttcgtaaaacgcccgttgccacacacacaagacagctgttataaggaaaataactataagcaatacactgtccagcagcaacatctttctttgtctttttcctgttccttcataaataaccagaatcatacacagcaaagtcaaaaaaataaaaaaacaaacaatcgtaatcggatactccggtgaacagttttcaaatgtttttatcatttgccgccacctcctcccagaatcagagaaagcagccatgatccgtcaaaatcctgctccgcataagctccatatcgtcttgcaatttcctgcagatctgttttacattccacactcatagacatgatgatccgcgcctctctgcgtttcagatttacattaaatgccgacagatcttccaaagattcctctatgactgcttcaaaaaaatcataaatctgcatagcatcttcacttcttatttcttctaaagcggtggaaaaacctgcctcaacatgattccattccagattctttatcgtttccctgaaacataactccaactctcttatcggaaattttactgtctgctccgcaataaaaataagattactacgcctttttatataggctccgatcacaactatcttccctaatatttttccccttttgttctcatcttcttccatagaatatgcttcaatgaattccgtcaaaagtttactctgccttgccgtctgtttctgtattttatcatacagctgattcttcacagaaagtttttctacttctctttttgttctcagattttcttcctcaatcagattcgcatcttttaattcttccttccgatcttcaagctctcttacgatttcctgtaattctgacaggttttccttccacaacacatagcctcccaaaattggttttcccgacagcctgatcccattttctaacatgatcggacattgaactacctgccttacgatttccggtgcaatacattccgaatcctgagattgataaatgcattttccactctgatctgtaatctgtgctgaaattgtagatgctgcaaataactgtgcgtatcctgtattggaagggatcaatccgcactggatgcagctttcaatgatcaaagcaaacagaaggcataatgcagctgtcatatcgcttgaaaatattttccagaagggcagattcagataataggcgatgccatagacaaccgacagaccataagcaccaaaaggcatccaaagcatttttttgtttttaatttttctgcaccttaatagaataatcaagagtgccaccagcagacaaccaagatcccaggcgactatagcataatacattgctccatatccatagactcctacttcataggaagctgcttcccccagtctcccctccgggaaagtaaaaactaactggtgcaggtcattcgttaatacaagcccaatcagaaacaatgccggaaaaaacagcagacaccatctttccggtaatttataattctctggctgtcgtatataaaatgccagataaagactgaccgtagggagtaacagcataggaatataataaagataccaggcgtagcgcagtgctgtcggcatctcatacggtatttcaaatttacacatacgaacgagcatccaaaaaaccatcatcgctgcaatcattattaaacaacgacggggttccttttggataattctcttttgaaaagaaatcgcccataccagataaagtcctatataaataaaaggtcttaaaaggtgacaaatagattgcagataaggattggtaaaggacacataatgaagcagaactgccacacctacgcatagtgctacacttccgacgtatactgtaaacttctttttctctgacactgtgcgtactccttcctgttacattttgcactatatcttgtttacagtatatcataatctccatcccaaattatatcttttattttttgatgtatgtacaaaactcgactttgccattgcagctatatctccaactccattttttaatgcaatgctttggttaggcagacacgcagacatttccacaatgaacacatttgctttcatcgcagtgaacacgcaggattgaaaaacagtggaccgaatatcttcgcgactgcgtagtggattgttgccgcctcaaaaacaccaagaaaatgtcgggcatagcgttttcctgcagtaaaaagtgctgtttccaacgcaaggcatcctccaatgtagctgaaattcaacagataaaacaagtttcctttagccttccacaacgtgattgccactgtctcaaataacaaaaataatagaagtgacgctatatatttgcgaagcacattattctttctcatcattatcctcttgctcctctgatttcttattttttctcagcacatcaattgcagggccgatgctaacccccatcataacccccagacacattccaagaccaatatcatctattagaaacccaataactatacctaagcttagtccgatagcaatccagtaaaatatcatgttcttttgcagtaagaggtaaaatcttatcttccctgtattgttctctctaatgtgtcttgatttctgccttctggcaggtcatatataaattcttccataatcctgtactcattgatttcatactgtcctggtaatggaatatactcttctataaatgaatcttctatttcttcaataagttctgaattatcttcgccatcatcttctaatttaaccttcattttctatcatcccgctaattttctataatctcccagtaaccgctcttaggcgatccatgtcttataagtatggatgatgtttcgttttccttctgtcatttgtacacgatgtacaggtttcttttgtcttgccataataaaaggccctcctaatgatatttattgtatcatagaagaaccttataaacattattttacagaaaaagtttcatactctctttatatacgttatgaaataaaatttttatctcttgaataatcacaaaatgttgccattttgttgccaaaacaacagtaaaatactgccagatctttccttcaaatccgttcttttcaaattcctcacgaagaattgcgtcagattcacgtactgcttccaaacgatcacgtgtgatagctcccggacaacgaactccaagtcccggtcctgggaatggctaacggtaaaccataccatcaagctttcttgcttcttcagcaaatacttcgataaattctccaccgataatctttctcttctcttccggatcctcaactcctgctaatttgtcaaggaaacgatctgtagcatccacataaactagatttgcattcatctgattttcctccttagtatcctctcaatatctacaatgattgtagcgtcattatgattacacgtcaacacattctgacatgatttgatttatttatctttcaaaaatattgctgtactcttttccttctgcagtgttttattttcatcaaaaggtatatgatttaagcttttttctttgcaccataacattttgtcaaatatctgtaaataaaagtatttaatattccaaaaagctttagcgatttaaagcagaaaatcactaaattgtattgtcgtatacaaaaacagctgttataatattaaaaatgataatcagataggaatggtgataaaatgagtcagttagaaatattaagagagagtcttggccagtgtgatgaaatcatcctggatgcattgcttatgcgtaatcgtattgtagaagatatcatggcttataagaagtccaatgatcttccaatcttacagccggaacaagaggccaaacagaaagaatggctggaaaaaagaatggaaaaaaaacgtcataaagctgaagtagaagacgtatttggaagcatcacaatgaacagtaaaagaatccagtccagaaaattgtttaactataatattgtgcttattggattcatgggaaccggtaaaagtaccatctcagagtttttgaaaaactcctttgcaatggaagtaatcgagatggatcagatcatagctgaaagagaaggtatgactatttccgatatttttgaagtatatggcgaacagtatttccgcaacctggaaaccaaccttcttattgaaatgcagtccaaaacgaatgtcgtgatttcctgtggcggtggaactccaatgagagaatgtaatgtcgttgagatgaagaaaaacggacgtgtagttcttctgactgccaaaccagaaactattctgaaccgtgtcaaagacagccatgaccgcccgctgattgaaaataacaaaacagttccgtttattgccgatcttatggagaaacgcagagaaaaatatgaagcagcagcggatattattattgaaacagacggaaaagatgaattgcagatctgcgaagaactaattcttagactacgtcagatggataataaataaaaacagcttatgaagtcgcatctaaggattcagacccagaacaggaggaaaaaaatggaacagcgaattaaaggaacaacaggtttattagcattgattggaagtccagtaggacattcaggatctcctgatatgtataacttctgcttccgttatcacaatttggactacagctacatggcttttgacatcaaggaagatcaggtaccggcagcattggatgcgatgcgtctgttcaaaatgagagggtgcaatgtaactatgccatgtaaaacggcagcagctcaaaacatggatgagttatcacctgctgcaagaattatcggtgcagtgaatacaattgttaatgaaaacggaaaactgatcggacacatgacagatggtatcggttttgtggaaaatctaagagaccatggcgtagatgtaaaaggaaagaaactggtgattttaggtgcaggaggagctgcaacagccatccaggtacagtgtgcacttgatggagcaacatccatttccatcttcaatccagacgatccatttcttgatcgcgcaaaaggcacagctgctaaactgaaaaacgaagtaccagattgtaatgttcaggtattctgtctggatgatccgggaaaactgaaagaagaaattgaaaaagcagatattctggtaaatggaacactggtaggtatgaaacctcatgaagatcgttctccaatcacagacaaatctgtatttcgttccgatctgattgtatgtgatgttgtatataatccggaagagacaaaacttcttcgggaagcaaaagaagccggttgtgcaaaaacaattggtggaaaaggtatgcttctgtggcagggcgttgcggcttataaattatataccggcctggatatgcctgtagaagaatacaagaaatatcaggcagaaaaccaaaaataaaactgctcccagttaagcaaacaataaaaatatcatagaaacatttataaacaaaagtagcggaagtccttgatttttaagggcttccgcactttttgacccgttcttaaaagcagatgtaatgtatttcctgcttttctggtgcttcatcttaaattatcttttattttcctgaaccaggcagatacttcctgctccgccactgagcaacagtagtatcatccagcagaacagttcattactatccgctgttttcggactttttactgaagtttttgttccacttgcctgttcttttttcacctctgttttcgcagcttccggctgttctttcgatggctgctccggtacagacggtgtaacaggcacagatggctgttccggttcgactgtctctttggttgtctgaatcatattctgcttcgctacacttgcagtaactgcatcggaaccctgttcaaaaaattgaatcaacagctcttcgcaacaggaatattctccgatctccgctgcattggcaagctgtggatagctgtcagaaccggcaagataattattaactgctacagtatactcttttgtatcatccaactcctgcccatctttttgcacagaaagcacacgctcccccgccggctgtgccggatcgaagcggacggtaattccaccaacctgcagataacttccgctgtcatttggccacgcatcccattcaccactgtcgtttgcaacaatacagtttttctgaatagtaagactgctctccaacatttcctttatctgtgcaccggtcagcttctttgtcactacataatttccataaggactgacattgataacatctccatacgttaccgttccggcagcgatagaagcacggattccgccagcattttcaaaggctatatcagcccctgtggcaagcaggtacgcatcagttatgacatttccaagatttgtctgtccgatacggatatgttcccagacaccgtccaattccaccggtgaagtaccgatgacacgattcagtgctgtctcgttttctgctttgatcttatccaatacatctgtcacggaagcatccttcggatagttctgtgctgcttcataatcgacagatgttttctcataatccacatacacacttccatcctcatccatagtacagttcagatcgatcagccccacactatttaaataatgtccactttccgatacataggtttttgaaccgtccggtgtcgtcacagattcactgagttcaatatgttcatgtccacacagccacaaatcgacaccgtccacctgcgcagccacattctttggatcaagcgtatgggataatgcgatcaccacatcacacccttctgcctttaaagtagcagcttccctttttgcataagctactgcatcctgaaagtccaatccctccacattagatggtgttgtcttatttttcatctccggatcacttacaccaaacacaccgatcttcaatgtttttccattttttgtaatctcttttacaagttcatccgtatcaaaaaaggatgtcccatctgcatttttgatgttaccggataaaattttgacattagcaattccaccaagctcttttaaacgctcttttccataactccagtcatggtttcctgtggtcatcgcatcatatccacaagctttcatcagttttgccaccgattctccctttactattgtcgcaatcggttgtccatgaaaggtatctccggaatccagcatcagcgaaccgtccgctccttccgtaaatgtctgtgcaattccactcagtcgatccattccgatcacctgattgtaatcatcttcctctacccgtgcatgaatatcattggtatgtacgattttcacatcaaaaattgtacttccagatgcagttccatcctgcgcctgtaccggcattgccccaaataatccgaaaactatcccaaatgtcagcaaaagtaccgttaccttattccattgtttttttaatttcttcatcttactccttcctttaatgagacggacattcgtaatctacattcactacttgtttatgaaaacagcccattatatggtttgttttcatattgtttccttttattatatgtaaaaagctgtgaaatccaatacttgatatacaacatccacgaacttcaactattactttaaaagtacaaattatctttccatccggtatagcccgccagagcctgcatgagttcgtaaccatatcctcgtcttacaccgtttttatcagcataattgaaggtatcctcaaatgaacagcttattgatcctacaaatgtgaagttatcaattagcgaaatccaacaactcgattaacttatcgagaaatgcctcttccccccatgtattaattttgaaaaatacagcttggcttcctcccgctgtaattgcggaaagttgaactggatctttgtcattttgaaaaagtgtaatattaagactcactctgtttcctccggcatagctgtaacgctcaaaaacacgaacgctacaacgcgcagttccacttcgaaagtcactggcatcttctaacgttgctgacatactgccatttattattccgttctcaattttggaaagtaactgatcaaaatcttcatttatatacctttctatttttgccatacccaataccttcctctcaactatctacactgaaatctggagcactatttacttacctgtttttatttcattttaacttagcaaatgttataagtcaatttttaggttattttgaattttctaaaattcttttctctcaccctgtattttaccctttcatcttttgtatatgtaagagggtttgtagattaggatacaaacaacttcagatgaatgtttttatgaacaatttccttcaaatcaggtttccgtccaacgggtggttcattatttcatccatctcataaattatacttttttcaattaccaaatctcctcctgttgcaaataatttaactttataaaaatcttccggaaaaagtaagtttgacataacaacctctccgtctgcaaatttatcatgaggatttactcctgttgttgttctatcaacaaaacagcattgtttttctttacagaatacaatttcaaattgtcgattttttcctgttgaaattttaattccaaacgtttgcgcatgaatcttttcaatcggataagatatatctagttctagtacttctttcttatcgcacagcgtccactcttcatccgctcccatctttatgttcttcatttcatgcttatttgttcttaaacactccatttctttaacaggtaattgctttaaaatatattttttctctttttgcactaatttcaattcacggacacaagacatctgactcttgaacggacttgttggaagataatctctgtattgccaattatcagcctatgcaatcatcaatcttctgtctttaggtacatgattccacgtaactccagcataaaaatcttttccataatctatccaaagacctttctcttgctttgaatctactataattttttgaccatcgaattctcccacaaaatactgcattccggttccacctgctggggatccatcattaatacttagtaaaaatcgtggtacctactatttactgtttactgttttttagagtgtctcataaaaaaactaattcgccaaggcgagtggtttgacgtttacctttgaccgtttagagaagcgcttgggcacatacgaatttatatccgtttttgaaaatatattgaccgatagaggttccgaatcaggagatccggtaagccttgaaacaggtattcagggaatccagagaagcagtatctactattgtgatcctatgcgcagcgtgcaaaaaggcgctatagaacaaacacacacaatgcttcgcatggttttacctaaaggaacttcttttgaattcttgacacaatgggatgtgaatctcatcgtaaaccacatcaactccactccgcgagaaatcctcggtgaaaggacaccatatgaagttgcattagaaacgcttggtgaagatatcttaaaagcatttcagcttaagccgattgaaccggataaggttaatctgacgcctaagctgatgcgctttaaccgttaataaaactaatcgaaatctgctgtcagactggatgtaaacttttcacatttttaagatgtagctggtggaatttagtctagcacaccgaattccagtaacccatttagcatgccttgaaatcgagaaaatttcgataagttgcattaattatagcagaaaacgagagatgtagttcaaaaatctctcgttaaatcaacaaaatttaaatcacgatggaatttactcttgcactggaatttactttttcaagtcagccacaaaattaagatgaacatcaaaatgacacatgcctgttttttacaagctcaaaatggctaactgtttttattctagattttatatgctttcttcttgtatcctattcaaagctcttactgtactggtatgtagcacttgcattcttcttttatccattgaaacataataagaataaattatgtctaaaaatattaaaattggaaattgaggagaaataacatttccatagttaagatattttaaagatggtatcagtactatttcgtcgcaatatgatgaaatccttccatttttatgtgctgtaattaaaactgtttttgattttttttcatgagcttgttgtaaggagtataatatagattctgtcatgccactaacactaatgccaataaccatacttttagaattttgaaaaactgtttgaaatctcattatatcactatcggtaatagagtctatatctacaccgattctcataaatctactttctgcttccatagcagctaatccggaacttccttttccacatacaaaaactcttgatgcatctgccatatattcgcatattctcataatctgtttttgatcaatcaaactatatgttttatttaataactcttgataaatatttaaaacagatcctgcatttccaacaatctttaaatttctttctgttaaattctgctcatattgataaataaattctcgataccctctgtaaccacatttttttgcaaatctagacaaagcagcctctgaaacaaataatctattggaaatactttttgcagaaaaatccattatttcttcattatttctgaaaaaatttgcaatgtttttttctacggaagtaaaatttttataattggcttcaataataggaataactgattttaaatagttcataatttctccttttgtaacctagtgtagtgacctgttgatatttaacaatactatcgcctcattaagaggctgtggtatatgcaggatataatgaactgagctttattcgggcatcgttggttctaaaatgccaattgacctttgctgccagaatattcctctctatttcccatgcagatagttcgcagcgtagttcttctatatcagaaatacgacggtcgagacattgccgggtcattacattgagttctatttctgtaacatccagacagcttccatgcttcggtgtgtaatgtatctccagctttttagtgatacgccttgcttcttccggagaatatcgtttatacatagaagagggtttatgagtattcagattatccatcacaagtatgatctttttggcatcaggatacataacatctacaagatatttgatctcctctgcccagtcaacagctgtacggtgttcccggacacttacatgatgaacaccaccgagaggttccacaaaagcaaatgagctatgaattccgtgtcttcttttgaggggatgcaccagtagtcgtttttgtggggtcgaagtttgttttttttaaagcattgcggattgcctctctgccaacaggagtttctaaaatgactttggattctttctcaagcagacggattgtccaacgggaatgcccttctggaacgaggccacaggcaagttcgatcaactgagcttctgcacggccatcaatcttacgtcttgcattgtctgaatttatgttcctttttaattcagtaacggcatcaatgccgccattgatgtattttgccacagtgttagtaacagttgccatgcagacaccattagattttgcactttgttcatgagttaaaacttttccatgcgcttcatccaggtcactaatgatctggatgaagctgcgaatcgttcttgaagtatcttttttacgaataacagatcttaatcttgcaagttctttatctgtaagctgaatattatattttttgggtcttgccatagaaatcaccgccgttcttttttattattatacatcagagcggcagtaaatggtaaaaatatttagctaaacatcaacaggtcactacactagtattaggggtgaatattcgatagttttaaacctgttatctatcaaaaaacaaattcataactgtattcacggaaaatactttttacaattactaactcatgatttttactttttgtttttctcacatgcttattttaaaggttttgacgatttttaaagttgtagaaagctcctatcattccagcgtcatttttatataatgcaaatttaaactccatattatcaaatataattggaagtaaatatttttttatattttttctaatttcttcttccaaccattgtccttgtccagtaaatccaccgcctaaaacaacaacctttgggttcaatacatagcaaacgttggaaatcccacgagcaagagagtctaacatagatattatagcttctacacaatcagggtcaccttgttttgcactagaaaatattctttcacctgtccaactcaaatcacatttcttatttcttatatagtcaacaagtgttttcatagaccctctatcttgaaaagaaacatttccatccaacatatatcctatttcacatgcacttcctgtatttcctctgtatacattaccatcaaggataaaacttccacctattcctgttcctaccgttagacaaaatacggatttttctccttttgcaacacctgaaaaaacttccgcaattcctgcacaattaacgtcattttcaacttcacatggaatttgaaacaactcttctatatcctttttaaagttgatacctatataattaggaattgtatttgatgcatatattatttcaccggattctgggtttaccattcccgcagtagatatacacacaccacaaatgttataatgtcgaactatatcatcgatcaactttaatattttctcttgaatatgctgtccgccttttgtagcttctgtatccgttaaataagtttctagaaaatttgcattttcatctattattccatatttaatggctgttcctcctatatcgaagcacaaataataattcaaaaccaatcctccattaataatttatgatctctcggaatcttcagcccagtaaattcaaggctttctgattcctttttattaaaatcccccactttttgttgttaaaaacacttgacaaatcgctcaaaatttgcggcgaagccgattgaatatattttattttatcgactggagggcgatttttatgttacctgttaattgtggcagtcatgctgactaccaaaaccttgttgttactaatcttcgtaaatattatcctaatccaaatgctcttgctcgttccacctgggatatcattgagcggttttggaatctcgatttatcttttactgatacttttatggctgataaatattcaaaattcggaccaactccacgaactccttcttgcatgcagcgttcttatcttctttccattgactttaaagttacttcattaacggagttggctgctcagcttaaaatgaatcctctttatgctatccttagtggatttgaagttggtaacactcccggtatttcttgcgttcattttttcgttcaagaataatatttacttttcaaagttcaatgccagagttttgctggcatgatcactcaagattccgagagatcatattttatttaataaataattctcttgcttcttttatcatatcggcagcttccattgatattttaaaatctgattttgtcatagaaggtaatggtgaacgcacatcaccaatatctattccttcatttactctcaaaacttcttttattaatgcatacatactgccttgaccggagcaaagtttttctattattctattcacaaaatattgtatttttttagcatcagttatatttccttgctctaacaaattatccatttttaggaatagttctggcattacaccatatgttcctccgataccaccgtcagctcccataacttttcctgctatatattgttcatctacgccattaaagattacacaatcatttccaccttcagatttgaaaatttgaatgtcttgagtaggaatagaagaatttttcacacctattacgcgtggattttctctcatttttctaaacaaaggaactgttaatgtcgttcctgctaattgtgggatattgtatataataaaatccgtatttggagctgccgaactaatttgattccaatattctgcaattgaatcttctggtaatctaaaatatattggtggaatagaggcaatggcatcgactcctaaactttcagcatgcttggctaatgtcatactgtctttgatattattacatgcaacatgagaaattactactatacgtccacttgcttcttccattactgtttctaaaattttttttctttcatctacagtttgatagatacattctcccgatgatccattaacatagattcccgctactcctttgtcgataaaataacgaactaattttttcacaccttctatattaatttctccgtgatcatcatagcaggcataaaatgcaggtataattccacaaaatttttttaattcacacattctcaaatcctccttctaaaataggaatcaattatccaattctaatgcattaacaaacgaacgagtaattatctgtggtcgtgttataattgatccaacaacaacactatatgctcctaactcaattaccctttttgctttttcaggggtatcaatatttccttctgctattaatggatgcttcgctaattttaaaacttttcgaattatttcaaaatcattattttctatttttaatcctttactttggtttgtatatcccacaagtgttgtacctatgaaatcaaatcccatagcatcagcatttaacatttcttcaattgttgaacaatctgccattagtagctgctcagggtatttttcgcgtatttcgttataaaacgcttgaagtgaaagaccattaggccttatatcacacgttgcatccaacgcaatgatatctggttttacttccattagttcatctatttctttcattgttggtgtaatatatatattactgtcttcataatctctttttacaattccaataattggaagatttacacacttttgtatttcagaaatatcttcttttgtatttgcacgaattccacaagcaccaccttctagagctgcaagtgccattcttcccattataaaaggagaatgtaatggctcattatctaatgcctggcatgaaacaattagttttttatgaattgattctatgtttttttttaaatttgtttccttcaattactctcacctcacttaggtatataaatgacatgctacaaagtgttcattttcaacttcgtataattcaggctccatttccttacatatatttttacaatatttacatcttgtgtgaaaagcacatcctttaggtttagatataggagatggaacttccccttctaaaacttctcgttttttttgattctttatatccggaataggtatagcagaaagcaatgcttttgtatatggatgacaaggggatgcatataacttagagcaatctgataattcaactattttcccaagatacataacagctattctatcactcatatattctacaacagataaatcatgtgcaataaataaataggttaaatttaatttttcctgaatatctttcattaaatttaacacttgtgcttgtattgaaacatctaacgctgatactggctcatcataaattaaaacttcaggatttatttccaaagctcgagcaatacataatctctgccgttgtcctcctgaaaattcatgtggataacgtagcatataatctggttgtatattaaccatttctaatgcattagaaatcattttttctcttgtatccttatttgaaaatccatgtatttttagaggttcatgaaatgaatcatatactcgtttcattggatttagtgctgaatagggatcttgaaaaaccatttgtactttttttctaaattcaaataattctttttttgaaaattgcgtaatgtctttttgttgaccctcgtaattataaaatatttttccacttgttggtttttctaacgacattatagattttcctaacgttgatttaccacaaccagattcgcctacaatacctaacgtttctcccttgtatacctttagacttacgttatcaactgcacgaacaacattgttttttctgccgtgaaaatatgtgcataaattttcaatatcaaaaattacttcttttgattcaatttgtctcacaatcccacccccgttctttataaagtaaacatcttacgctatgattttcgttttctttgtaaagagatatttttcctgttctgcattcattcttacaataagtacaacgatcggcgaattcacacccttcttttaaatctgctgggtttggtgttatacctggaatagtttctaactttttatcattggccattcctaaaacaggtacagattttaataatgcctgagtatatggatgtcgtggatttaaaaatatttcttcacgtgtacctttttctacaattctgcccatatacattacacatacatctgaagccatctgagctaccaggcccatattatgtgttattaaaactatagatatccctagttgctcctgcaattcctttaaaatatccatgatttgtgcttgtatagtaacatccaatgctgttgttggctcatcacatataattaaatcgggattgcatatcagtgcaattgctataactactcgttgtttcatccctcctgaaaattcataaggataacaattcacccttttttcagcatccggtattcccaattttttgaaaatttctatggttttctttttagcttctttcttagaaattttacaatgttcacgtaatccttccattacctgatctccaactcgatatacaggatctagtgatgacatcggatcttgaaaaaccatagatattttttgccctcgcagataattcatttcttttccattttgtttttttattttattaatataatgtggttttattgttccattactctgtttttcgtaaaatgtaatctcatcagcatctgttttagcatttcgtcctaacaattttaaaatagaattcattgttactgatttaccgcaacctgattcacctacgattgctaatgcctttcctctttttacatcaaatgaaacattttttacaatatttatttctttgttatcactcaaaaaacttgttgataaatttctaacttttagtatgatatttttttcgttcataatatttatctcacctaacttttcattatcttgggtccaatagatctcgcactccatcacctaaaaaattaacagataaaacaaaaattgtaagaagtacagctggaataacccacatccaccaataatttgtaatgactcctaatgaagttgctgaattcattatatttccccaagtaggtatagaatcagcaacacctactcctaaaaaagaaagacttgcttctgataaaatataacctgggataacagccgttgcagaaacgataattggtgtcattatattggggattatttctttaaacataacttttattttactcataccaaatgcctcagcaacttttacaaaagtttctcctttaaacgctaaaaattcatttcgaaccagtcgagctgtagacatccatcctgtgacagtaaatataattaatatatttcctattcctcttcccatcacagcaaccataatcataaccaataccatttgagggaaactctgaaatatttctgttaatcggataattaaagagtctattttacctccaaaatatcccgcaatagcacctaagataacacctaacacagtacttgataccgcactaaacactcctatatatatagaatatcttccaccagccatacatcgaataaataaatctcgtcctaatttatctgttccaaaaatatgttccatggaaggtgccgatgcactttctgcaatattaactgcatcatatgtttgcttacttaatattggacaaataaaacatgctataacgattaaacacgtcattataaaacccaatactgataatctattcttcaaaaatttattaattcttttttttcttatttccttacttcgcaattgtttttgttctttactaatatattcttgatgctccatatgatttttccctttccacttatgaattaatttataagtttgcacgaactctaggatcaagcaaagcacttataatatctagtaaaaaagatgcaaccaaaactgatgctgcaataactaatgctaaaaccataactactgtgtaatctcctgaaaccacagattctgttaactttgccccaactcctggccaagcaaaaacattttctactacaacagatccactaaaaagaaggcttattctaaacaccaatattactaaaactggtcgaagcgcattacgaaatccatgtttaatgtatactttccattcaggaattcctttacttcttgctagtttaataaaatctgaattcatgatatcaagcatagaatttctagtatacctcacaagaactgcacacattggaatcgttactgcaatgacaggtaatattagatgctgaacagaatccaaaaaagatcctgcaccattagcagaaaatctaccacttgatggcaaccaacccaagtttactgaaaaaatcgctaataaaattactccaataataaactgtgggacagcctgtcctaatacagctaaaaatctacctatgtagtcaaaaataccgttttggcgtactgctgaaataattccaaatgctatgcccaaaatagttgaaacaactaaagaaatccctgaaagtatcaatgttgcaggaaggtaattttttatgatatctgcgattgctgttcctgtactaagtgatatgccgaaattaccttttagcatttcgcctaaccagcgaaaatattgtacaattgcaggatcatttaaacccatgctttctcttaattcttccaacaacgcaggattagcaacaatatctggagatgccagataattaattggatcaatacctgttgctttcattccaaaaaaaatcagtgcactaataattaatagcatgggaatcatcattaataattttttaattgtatattttatcattttttctcctatccaatatgcacaaagagggatgaataattaattttcatccctctttgttaggcagtttcacttaatttcccactctgtaaatttaatgtcacatctatgtcctggtgtacccatatcaagatcttctggaacattcaaacgagatgtatttaaataagtgtagtatcccagtgtcaaaataggaactttgtataatttctcttcttcaattttctgtaattcggctttcgcagcattttgtccttccatatctgtggaagacatcaaacgagaaatagattcatcaaaagctgtatctccaccataaatattttggaaagttgcactatttgacatatattcagaataatatgtatctaaaggaccagttcctttaaaaccaatatcgtaatcacgtgtagtaaacaaatcctgtgttccctgacttgtatatgttgattctgctttcattccaatatcctgcaaatactgaactatggctgcaataatattctttgatgtttcatcatcattataatagagaatacgaactgtatagtcccaatcccaaccagcttcgtctaaaagtttttttgctttttctggatcgtatttatagaccttgccatcatttgattcatcactaactggcacaccattataaataacttttgctacatcaccatataaagctgcaattgcatctctatcaattgcatatgcaactgcttctcttacttttggattttgcattgctggattttgattaccatccgctccgctcatattaaagatcaagtatttatagaataaatattcattaaaatatcctgtaagattttcatctttatttaaaacttcaatatctgaacttgaatttgtaaatgcatagtcactcgctccagatgtaattgctgttgtttgattggaaacataattacaaacaactttttcaatcttaggcttagttccttcatagttttcgtttaatgacaagctataataacttcctgcatgcatctcatcaaatttatagtatcctgaagtaactggttctgcccaaaaatcagactgataaagagttaatggatcttcattttccaaactatgttttggtaatatcgaaaattgtgccatgctttttaagaagtttgcataacttccagttaattcaaaaataattttatttccatcaattacaatacctgaaattgtatcagctgttccttctgtaaattcttttgcacctttgatataattaaaacatgttgtaaatgttgatgtaacttgtgtcgcttttaacgctgtttctgcagaccatttcacatcttctgcagtaagaggctcaccatctgaccattttaaattatcttttagattaaatgtataaaccaaaccatctggagaaatctcatattctgccatatcaggagcaaattctgtttctgctggattggctaaaactaaacttctgtacattaagatacatggtaatcttaagttataccatggaaattcaactttgtccgaacttgtactttctttttccacactaatatagagagctttatccgtattctcttctttttgggtttttccctttgtattttctttactttccgttcctgaacatcctaccatactaaatagcattgttcctgcaattaacattgcacataatttttttattcgctgtttcatatttttctcccttcctattttttactgtaagtataaccacaatttaattgtccatatcgtgtagtatgtctgttccacccaacacctggatacacaatctcatcttcaaactcaagcgttatgatagttaaacctaaaatagaatcttcttcattttctggcaagcattttaaagtaattcgatattcatcttgattgaaatcaatctttgtacctgttgcagtaaaataagctgattttaatttcgtttgaatccctgatatataaattgtattatcagacggccaaataaaattccatgcatacgcttttgttttttcaaaacagattcccgttgttgtatgataattaatcctttttgctacttttcttccgtataggaaacctttgtttttctcgatccatttcccaacagtcaacaatggctcaataacatcttctggaattgttccgttcgctttaggaccaatgtttaataataaatttcctccttcctttgaaactaaatacaacattcttgcaatctgttgtggtgtatggttatatcctcttactctttcagaatctaaatatccccagcttaatccattaaatgtcatacatgcttcccagtctttatctgctgggataacatttccctctggtgttgtaaaatcctctggtaaaaagctacgattattaatgataatatctggttgcaattctcttatacgttggttcatttctaaagcattccatccctcttgtgattccattggatctggaacatcgtaccacaatatatctatttttccataattactcattagctcttcatttaatcccataatgtatgcttgatatctgcgtctagcctcaccagcatatgcacatttactactatctggatgtcgccattccattaatgtcgaataaaatccaatacctaatccatactctctgcatgcatctacaaattcctttactatatctctatgtggtccataattcacagaattaaatgaattaattttggaatcccataaacaaaaaccttcatgatggcgtgttgttaacaccatgtatttcattcccgctgctttcgctaattttgcccattctctacaacatccttctactggttgaaacccatcaacatattttgcatattctgctggatcccagttttcttctgccattgcccattcatgttttccgtacaccgaataaatcccataatgtacaaacattccatatctcgcatctctccaccacttcattcgttgatcacgagtttttgctaattcattctcatattccgctctacatttcattgtacattctccttttaacaggctgtccattgtcacttattttattttcattctatttatttttgataatattttcaatattttactatatttctgaaagcacttttatttttttatgcattatgtatatttttttattatttatttatatgtatttctaccttttttttaattattttcaaatttttctatttctcctagtataataatgatgtagtcaatcaagactacttggttaataagtttctataaatcagataacagaagaagggattcttccttcatcagatgttatccgtaataatgatcatgtctgacggttcctgatagacaccagataaaacataaggtatcatctcttaggataggacaaagaatgtatttctccttgggacactgattatcagtggatacctgtaattaagtcaattagtccattcgacagggttttatgttttagctggttgggagccggaaggcaatacccgaataacgcgctaggttgtgtacctgccagattggaaatggattcctatcagaaaggagcttttgctcatgtcaaacaaagttatttttaatcttgatgaactattcatctctgttggtattgatgtcggtgctgatttctcctggatgtctatagcacttccaaaccaacaattcgtaggaaaaccttacaaaatcctacataacagtattgattcccttacaaccgctgtttctaaaataaaagaagcagaagagttgtattctttggaaagtcgcattttcctcgaatccacgggaatttatcattacccactcttctgctatcttcgtgataagggttttaactgctcggttattaatcctatcatcactaagaatagcacaaatatcaacatacgaaaagtacataatgatcgttttgattctaaaaaagctgctttggttggtttgaaacctgatttaaaggtttcacttatgccttccgatcttgctctaaactgccgtaacctatgccgtgaatactacgatttaatggataatcgcagtgcctatgtgaataagcttcagggtgaattacgcatggcgtttccacagtatctgggcatcttttccaaggttactgtcaacacttctcttacattattggagacttatacctctccatcagcttttcttaaagcagacaagcaagagattattgatatcatcaaatcaacagctcgctttgggcttacatatgctcaaaataagtataatgccataattcaggcagcaactgatgcaaatcagtttggttacatcatagacagcaacatcaagcgtatccgcctttatatcagcttcatacgtaaatatgatgaagaaatcaacaacattcttgaatcgctccatgagcttgttgatgctaatgaagatgccgactttgtcaaacagattcatttgattgaaacatttaaaggtgctggtttcttgtctgctgtatccatcatgggtgagattggtgacttctcagcattttcaaaaccaaaacaacttttcgcttatttcggtcttgatccggcagtaaaacaatccggaaaattcgaaggtaccaaggttcaaatatctaagcgtggttctgccatagctagacgtgttattcacacgttaaccttacaaagcatcagtatctcccgtaatggagaagctaaaaatccagttcttcgtgagtactacctcaagaaatgtgactcaaaaccaaagctcgtagcaatgggagctgtttcacataaggtatgcaatatgatatttgcaatactcagagacaacaaaccatcacctgctgagtaaacacgattgatactaaatgttcttccggtactcacccatgggttttctttagattgcgctgatgaagtccctgtctctttctctgcttctgcacttactggtaaaggcataatcgaaaatgctacgcaaaggctcactccaattgcaataatccttttcgaaattcttcttttcatccgcttcccactcccttctttatctctgtctctgcttaatgattcgttttgtatcataatttatactcttttataatatcacacacgcagttaatcagcaatattttttactcaaatccgcaccttcatttgatatttcgtcgataaatcgtggcaggactaaattaaagtgcattttgttcatattaattattgcattttaattattctgttgtgttttcaatacaactatagtaatataaaattatcacaataaaggaaggtccttatatgcgttataatgttccactatatttcgaacgaaagaatatcaaaagttcagatattttttaccttaccagacagaatcctcacacaatcattacgctttcctcgggagaaagcattacgactacaatcccgataaaagaacttatgctctacttaccagaagaagattttctaaacatttcaaaaggcgtttcttcgaaaaaatcaaattgttcatatatctgacgaggggctttatacaatgactgatggcgctgtctttcaaggaagaaaacgtaatctgagtcagcacaaacagatccgtaaggaacttggtttaaatacgcagaacctttcggaggtttcagaagacagctcaattcaattatttgatagctgtagctttctcaatgatatgccacttgctttttgtattattgaacttgtatttgatgcggagggacatggtgtagactttgtattccgttactgtaatgatgaaatggctgttgttgaaggcgttcccgtttcagaaatgttgaatcgttcattttatgaagtctttgaaaatggagataaaaaatggcttgtcacttatgcggatgtagcgttaaacggcaataaacatatcctgcatgattatagtccggaaatcgacaagactctgaccatctactgttttcaaccaactccgggatattgtgcatgtgtgttgattccgtcttagctttctgctatttggcgtatgcgattacaaagctatttttctgtaatcaaagaggctgtgatttcaaaatgtgttcttaacatcctgaaatcacagccttttctatttcgctctatttttcttctaaaatggattaatcatcttcatttatttcgtggttactgagcaatgacctgagtttcgccccgccagattttatatttctaaaaatagtcaggtgaaatagttcaattaaccttttcacctgactatttacatagcaaagagtctctgtacaattacttagtgtaacagcactcattctaccaatattttttaaaaatctaattcttaataatcaaactgacgataatatctacgaatagaaagtggatgtcttaaaaacagctccatatatgcatctacacgattattaacaccatgcattaccaaatgagaaattgttcctctaaattctggactaattccttttaattcatgttcttttgtatcaataatagtatagtttgcatttacacgtggaagaaattttgcaacacgctcagctaatggtcgttgttcatcctctcccataaacagagtaactggtgtatcttcaacgataatctcctgcattccgtggaaaaattcttgacagctaatagattttgtacggatccacatctgctcctcccaatagcacatagcataggaataggttgccccatactgatttcctgatccaataaagtaatgaggaagatctttatgttctttccaaaatgccaccttattttttgcatactcatatgcccactcatcggaatctttctcaacctgagctaatacatccgcaagattagcttccatctctttattataacggtcataatcatcaaattcaccatttttatacatcaagtaatttgcaaccatataaaatttcaactgctcattcattggataaacaatcagataatcttgcttgtcaggctgtgtgagagtagtacctggattatcgatgaatgaaaatacttttgcacctttttcatgtactctgtccactaattcaaccatttcttttgtatttccagatactgaagatataattactacagatttatttgtaaattttttgtttcctgtagtcaaaaactcagctgcattttcaacaaatactggaagctttgaacggccacgcatatatacttccacctgcatactggaagcataagtacctccaataccaataaaatagattccatcaaatccttcttcccagatttgatcaataattttttcaatctgcggacgaagagcaagtgctccattcacactatcaatctgtgcttgctcgttaaaattacgcaaacaagctccttctgtttctttccacgcttttgcttcatatttcatagttgatatctcctttcactactttctttttaatacaatttcgttgtctgcaaatctaaatttaagaaaaattgtatagcacgttgaatcattttatcccaataaggccactcatgatcccctggtccttccatataaacatgaccataaccattactttcagcaacttttctaaatttctgattattttcatataagaagtcttctgtaccacaaaattgaattaaccttggacgattttcgtctttagcaagtttctctaccaaaaacagtggattttcccactcttctggttttcctgcttctccatgaaaactctgtatttcttgtggcgacatatcttcccaatttccggcaagtaccatctccgtaaatcctacataatcgagtactcctgataaacttgccacagcttcatacttctctggtctattcaatgcaatcttcactgcaccatatccacccatactctctccagctataaatgtattttctcgtctttgatccaaatgaaaccatttcccacaaatagctggaagttcatctgcaacataatggaaataatcaattccaacttttcctgttgtgtaaaaactacgttgaacttcaggcataattattatgaaattatatttttttgcataatattcaattttagaaaatcgtgtccattcagcactatttcctgacagtccatgaagtaaataaagaaccttcggtgttccctcataaagaggtgttacatcattagaaacatccgggaaaataacattaatctgtgttgtcattcttaaatttttggaataaaaatttcctgtaaataatcccattattttaattttaccttttatctgaaaattgtacattaaagttacatttatcaccacgcacataattgcgattgaattcgattgcccttccatccgtatcatacgtaagactttgaaacaacatcacgggtgttcctgcatctattcccaacagttttgcatcatttaaactaggacgaaccaaatccaatgtctgctctgcttccgctaaatgaatcccatacatttcatatacttcatacacagaaaacaccgataaatcaatcccctccattttgggaattaaataatgcggtatatataattcctctaaagaaatcgaatctccgtcagcataacacatgcgcttaatataaaaaataggctcttctggtttaatgccgaacatgtttccatacaaatttcctgccattcttagatacttagacacaattctaaaagatggtttcatattcctatctactatcgtctgcgtaaagccttctaacttctccatgtttcgttcgattttatgtcctaaaacgtatacttctttatcagaaatatatttcaacaatccttctttgaccaagacttctatggctgttctcacgatttgcttctgaacaccaaacatttcagccaattctgtatcagtaggtatttttgtaccaggatataaatcaccatcttctatttctattcttaaaatctcactcacttgctgagtgatcattcttttacaggcagttttcatatttcggctccttattttttagttaccatgctccaaaatactttaatgtttctgttgcatttgctgcacctttttccattgccccttctatagaaagtccatctacaattcctgttaaaaatccagcaatgtaactatctccagctcccatactatctacaagatgatcacaaggaacgattccaaaacgatgatatctttcaccatcataacacaaactgccttcttctcccatcatacaaatgacaagcttaggtccctgtttttgaattctttccatttgttctcttacctctttagtatctcctgtatccacagaataaaagagataatctgtatatggtatcgcttttacactttcctctgaatctgggcttgtcgcacaatcaaaggcagtaacaattcctttttctttcaactctttaaactgtccttctactttgccccaaacatcacaaattacaacatcaaaatttttgatataatcaatatcttcatctgttaatttatatttttccaatacgccttcgtcgtaatctccaaatactctttcgccatctatcaattcaacctgggtaacggctgtctttcctttttctacacgcaaatgcgaagtgtcaacgcctttcgctttgatagtttctatcataatctgtccgtagacgtcatcacctactggtccaatatatgcagcctctcctcctaaacggagtgtataaactgccatatttaccgggcctccccccggaaatgcttttccaccatctatattgttataataatcaatacagttacttccaactgccgctaatctcatacgatatcactccttttttatctggtgtctcgccttgttagaacattcgtatattgtacctgatctggtctcgccataatcctaaaaaactcaatacctactcctctatcgtcgtttacaacacctgactgatagtacaagtattgtccttcttctaccttcaacaatttagcttcttcttctgtggcaaatgtaatttctactttctccgtccctttagtcaacaatatgcctaaatcccttagaactttatataaagattcttctgcaaaattgtgagcttccaaaccttcacactgttcgtaattaatgtaactattctcaatcatcaaaggaacattgtttctaatccgcaagcgatataaatgaaatactttatctccctcttttatctgaagttttcttgcaacatatccatcacacgtctcaattctagagattaatacttctgtccaaagaaagtaccctgtttttctcattgcttccgaagtagactgaattccctttatattcctaactaatctcggaggtgccacaaaggttccagatccttttacactatatagttttctttcttcaattagttgttgaatagctgtatggagagtggaacgattcatttgccacattgtacacaactcccgttcgctcggaagctgtgtatgtggttttagttggttttcttgtatataccattgaatctgctccatcgccatatcttgcggacgaattttttttattttctccatacagttctcaccttctcaacatattaagctaatgcttatgcactttcttttttattttttctatcccaataatagaatactggaagtcctgtagctactgccacaaacgcacaaattaagctctgcattggcgcatatgtaagctggccccaaataagtgtacctgtcataataattgcaataagaggcataattggaccacctgggcatttataagatggatcgtatccatgttctttgcctttttttcgaagaacaaagattgtaccgaatgtaagcacattctttaataatgctaccattgtaaagtatcctagcaatgctgacaagtttgaagcaaaaattaatacgattgcaaccgcacactgtacgataattgaaaaataaggagtttcgtattttggatgaacttttgcaaaagatttaaagaataaattatctttcgccatagcatactcgatacgtggctggaacataatacaagatgataatgaaccaattacaacaataattgccataattgcaacaattgtacctgcatactgtccaattcctggaagcttagatgccaacaatgcgattggagcatcagatgtagccatttcatcaatagaaagaattccagaagctacaaatgttaatcctgcataaagagctagtacaataactgctgtaagaataagacccaaaggcatattctttctcggatttttaatttcgcctgacatataacaagcagctcccataccatcatatgaccatgttgttgtagctacacctgcgattagcgcagcaattccacctgttgcatatcctttcaaaggtgcagaagataataaaatatccccctgaagattgaataaaccaataccaataaccaatgcaaatggtaaaattttaagagctgtaataattgtctggaattttccaccgccttctaccgaacgtatatgtactcccatgaaaactaatacaaatactacagcaaccagctttaataccaaaccatgaatcggaacaaaaaatgcaagataattcacaattgctaaagccatgattgaaattgacggtgggtcagttgcccaaaagctgatccatccacacaagaatgcgagtggtcgagatcctgcttcacggaagtaaacatattgtccaccatcctctggataggcagatgctaattccgaatatacaaagtttgatggaatctgaagcaatccccctataatgaatgctaataccagaaacaagctactaccggcagcatttgctacctcagataaagatgaaaaaataccagagcctactgtagtaccaacgccaagtgcaataacagcgccaagtccaagtttacgagcaagttcgtttttgttttcagacataaaagctctcctttccttttaaacagagtataattgaaaaatcttgtgcacgacttttctttttttaattttctattatcttcgatgcttttatattgtaaacagctatctatcttcgctatcacaatttcttaaataatctattactttttatttattcactttcacatttaaacgattcctgcctcggccattagctcacgcatgttatcaatggcacgtttcgcataaaaacgtggttcgttaatataatttgtaaccaattcaagtgttgcagttttatcataacctattcgtttcatttcatatagcatttctttaattggaatatttccctctcctggtatcagatgggtgtctgatccattttctccatcaataatatgcatatgatccatcttatttccgagtttatcaaaatatgccataatactttcatgctgtacaaatggtggaacaatatcacacatgccgactacatatggattatccactcttctaaatagctccaccaaatcatttgctcttgtaaagaaattagattcatacggtgttaaagcttcaactactagcttgatttctagttttgctgcataatctcccaactcttgaatatttttttctaatctgctccacaactgatcatatgtagcaagatatccgccgtttgcaggacttgtaagtacaaattccgcacccatctcttttgccatttcaagagacagtttcagataatcaacagcatctcttctctgagcctctgaaccaatcatataattgtaaggataggcattatgctccggtgtgtaaccaagcaccggcatttcatacttttcaattaatcggcgaacttcattaatatctcccgctttcagatccggtgcatatgcatgtggacgcccaccccaaagctcgatataatcgtaaccgtactctttagcatccataaaacaatgctccaacggattcctctgatatcccgatgtaaacattccaacttttaacattatttcattcctccttgttgtgttttgttggtaaaattatacaataattaagcaccattttctattcgcaagaggtctaaaattcaattataaaaaatgtataaaatcccataatcatgttgtttgttattccaatcctataccaattatgttattctgcatattttatcctctttatttcccctttattttctcttatttttatgcattatgcatatagtggtatgtttttgatttacatttataccaatttcatcagatgcacttattttgctacttattttttagttatccatccaattgccaatgctttgtgcaccatgataacttataagtgttctaatagatagtgtgcaatatctattagaacacttcgatgacttttattcattaaggaacaagcattcagctttgatttttttgttgctggatatctgacctttctaaggttcatctgttatttgatgtcgcctcacttttactcttaatatctttattttcctatatataagttatgtctttacaaatatcattaatcattaggaggtttaaataatatgtctgaatacgcagatcttattttattatcaaactgtatttttacagccacagaggaaatacctttctctggatatattgctatcaaaaacgaccggatactttctatcggaaaaggattggctcctactgaactaataggaacaaacacaaaatatcttgattatgggaacaaaacaattacgcctggattctccgatgtacattgctttttcacaggttattctgtaggatttgttggaatagacttatccgcagctacttctcaagaagatatactgaattcaattaaagagtatgcgaaaggaattcctgcagacaaacctattttgggacatggttggaactccgatacaatccaacctaatggaacagatttgttagatgaggctttttccactcgccctgttcttctgtttgcaaaaggctgcgaaacttgttggatgaatcaagctgctataaatcgttatcagtttaccccggaaacctgttatccggagagttatgttcgctttttaccagacttacttggagataaagactttataattccggaatttaagcgctatattaaaatgatgaacagtaaaggaatcacttccatcaaagaaatgggattcgatgatttctacggatttactgacattctcgcagaactagaatccgaaaacgctttaactatccgcgtaaactttatgagccaacctgttgctgaaccttttaatctctcatatggcaaggaaatgcgtgaaaaatttaaaggagagtttgttcgtttttctggatataaccaaatgaccgacggttctataagcgaactttgcggtgatttgaaaaaaccttattcctgcgcagatacgacctgtgcacaagacattgattgggatcttttagcaaacgatacctttaaagctgatgccgaaggatttcgtttctcattacatgctcaaggagatgctgctatttcaaaagtattagatatttatgactcttgccaaaaagatgaaaatggaaaacttataaatcgtcacagtattaccgatcttgaattcagtgatccaacagacttggagcgtatgggaaaattaggcgtaattgctgaaatataccctcaaattcaatctatcgcaaatcgaaaagacaaacttgccatgattgaagaaaagattggtatggatcgcggacagtattattggaacagacgtaaaatggctgacagcaatgtgttattaagttgcggaactgatcttccacttcttattgatgatatcccagaatctatttatcatgcagtcggaggatacttccctgaaggtggagagccatttaacaaacaaaatatgctgactattcctgagttgctaactgcatggagtgctggcggtgcttataatctatatcaagagaaagagctcggcacactggaaaaaggaaaaaaagctgatattgtcgtattcgacggaaatctatttgaaacagctattgaagaaattcgttctcgcaaagtagaagtaacttttctcaacggacgaatcgtatatagccatgaataaataaaaaaatatctctcttatctaaacagtttatattctctttaagaaaggaagggaaatatttatgaaagagtcttattttatggggattgatactggaacaaactctagtaaaggtgtattaatcaattctcacggagaaattatagcagaacatacaactgaacatgcaatgacaaatcctgccccaggtcactatgaacatgatgccgacaaagattggtggggagatttatgtattataagcaatgcactgattgaaaaatctaaagtttcaccatctgacattaaagcaatcggaacaagtgcacttggtgccgactgcctacctgtcgacgatcagtgtcgacctctacgcaaagctatcctatatggtattgatgcacgtgcaaccgatgagatagaacaactcacagaaatgtatggggaagaacagatccgacagtggtacggacgtccattatgctccagtgatgtaatgcctaagattctttggataaaaaataaagagccagatatatatgcaaaaacccacaagtttctaacaggctctagttttatagcagcaaaacttactggtaattatgtagtcgatcgttttttaggacttgcaagttttaatccactttattttaatgatggaacaccaaatcctgaaacttgcctaccaatttgccgccctgatcagctagcagaagtaaaggaagcaaatgatatcgcaggttatgtaactgaaaccgcttcaaaggaaacgggtcttgcagttggtactccagtcattgtaggaacagatgactccggcgcagaagcaatcagcactggcgttgttgcccctggcaaaatgatgattcaattcggttcttccatttatatgattctcgggacaaaagaattggttgatgatgaacgcttatggcgtgaagaatttattgtaccaggactttgtgatatatctgccggcactaatgctgcaggctctcttactaaatggtatagaaatacaattttcccagatgcactcgaactagagcaaaatggtggtccagatgcttatatcaccatgatgcaagatttggataaaattcctgttggaagcgatggccttattacactcccttattttgctggtgaaagaactccaataaatgatcctcttgcaaggggaattctatttggattaacgcttgctcacacgcgtcagcatatgtaccgaagtgctttggaatctgttgcatactcagtaaatcagcaattaaagatcatgcttgagcacgatgttcctatcgaccagatttttgccgtaggtggtggtgttaaaaatgacttatggatgcaaattgttgcagatgttactggtaaagaaatcagtacccctgccattactgtaggtgcgagttttggcgatgctctaatggctgcatcgggaatcaaatattcaggctttgaatctttcaacaaacttacagatttcattaaacctggaaaaacctatcatcctaataaagaaaaccatgaagcatataaaaaatatcagaatatttatgattctctttatcctgctactgtaaacttaatgcattgtttgtcagactaatctttgtagattagactttataaagactatgtgataattctttcatcaaacaaaaagtacagctgtatgagtttttaataactcttctgctgtactttttaaatctattattttattcatgaagctgaattgtaaatgaagtcctgtcacttctgataaaagagcggctatacgcaatcgctctaccattattgtcccagtaatcacaactcaacataattaatgctactccatttggaatatctaataatttttttatcttactcgttccatctataatctccattgtttgctgcatactggaaatttctattccataaaatgcaaaaatatcttttattgtaaaaactgatgagttcactacttctaacttcggcaaaacatcttttggtacatatatatcttcaattgccaatggctcactatccaaagttatttgatgtcgtacacaaaagattaaatcatctggctcaatattaaaataatttgcatacttatttcctgctggtctatatatttttgcctgctcctttatcgaaactctttttgttcctgaagacattacattaacaaacccaccatgttcatccaggttttcttcgtatttatcaccaacaacaaaaacaccttttccctgaacacgtctcaaaattccttcattaactaatgcatctactgcgttgcgaacagtcaacctattaataccataagtttctgctaatttattttcagacggaattgctgttcctggaaggtactctccctcttctattcgatttctaataatttctctcaattgaagataaattggtgtacgataatttaattttccgtcttcacgctcttcattttcttcggtatagttcaatttattatccataaatctgccctgcttttctcattattcactctctattctgctaacaagcttgaatttatctcctctaattaattgtttataatacataattatcactccttcttcatctttcacaactccagatgtaaaaaacaaaggagaatccggtattatctccaacaacgctgcttcttgttcactggcatatgtaacactaatatgctcctcgcccgaaatctgctttctatgatatacatttttcaaaattcgccccatgctagttttatcagtataatacttttcaaaatctggatatcgttcacaatcaagatatgttgtttccaaaaaacatggaacatcatctattttcctaagaagaatatactcataaacctcttgtccgagcagaacatgaagtttcttagaaatctgtttagttgcttcaacttttcttacagaaataatcttttttgccaaaatagatccctgctgtcgaagttctcctaccattgaatctactccaaccatgtttcgattcttctttcctacagatacataaactcccgctccgttaactctatataacaccccacgaccaacaagtgtatctaccgcctgtctcagtgtcgttctgcttactccccacatttcacacaaatctctctctgatggaattcttgtattcggagccaatcgatttactacaataaaatcttccaatttttccacagcctcagttcccggcggtatacgatattccatattcttattctccttaccattgtttacagaccactttcaaatgtaagctaattctatcatctttttcttcgttttccaaccaaaatatataccaaactcaaacgattatgtgtttttaatattcatcaaataatagcaagcttctttttcttctccggtacaagctccaaagcaatatacatcgactaatattatccataatcatgaaaaaccacaccatttttaaatcacgcccaaacataccaatataaatccatgtcaggcctatccttatcccccacattgttaatattgcaaatataaatggcatttttgtatctccaataccatgaaatataccctcatatataattaacgctgcatacataggctcactaatcgctacaattctcagtaatgacactccaagcacaataacctgctcatccttcgtaaagaaacgtataatcacttctgctccgcaaaaaagacctatggccattgctgtcataatagaaacagccacaataagtcctgaacgtacaaccgattctaattctaattcgtctttttttcccacagcatttccagcaagtgtactgactgcagtttgaataccatatcctggcacataaaaagcctgttcaattgtaagtgcaatcgaatgagctgctacacttagtgttccaagtcccgctactaatgctgaaaatacaacatcaccacatcccacaacaattctctctccaattaaaggcaaggaaacattaaaacaattttttaacagttttccttccggtttcaccttcattccttttagtgtcaccaatggattttgcattgcaacccaaaaaatagtaactccacctatcccttgactaattgcagtcgctatagcggcacctcttactcccaatccagctcccggaatactgagcaacattccaaatactgaaatcgtagtatgagagctaattaaaagctgatttaatataatattcaaaaaattcacaccaatatttatataaagaggtgttttcgaatccttgtttgcccttaatacatttccaaatataatcaggcttcctctcaatatcaacggacagtttactataaaaaaatactcacttgcatctctccatatttcctgactagcgcccatccacattggcaacaccggactaattgctaaagcaatcactgtttcaatcacgccaaaaacaaaaataatccaaattgcctgtgctgaagtatgatgagcagcttccaaatctccctgtccagtatattgggcaataaacgaaagcattcccatgctaacagcaaacaaaattccatttaacaaccaatttacagtgcttgtcagaccgacagcagcacttgcaatcgcaccgatctgaccaaccattgcagtgtctacataagctacaatggtttgcagagcctgttccagtattgtcggtgctcctaaatcccacaattcatgcatctttgaattcttcaagattatcctatttttttctttcaaatcaggcatgattgtcgcctccatttcacttgtattagctttcgaattatatatgatgttttattttaccactatttttgtttgttttttttaccacttatctatttcaaattatatcattgaggcatatttatgtcaattatcacaatcgtataaacactgaagaacagtatcttcatttgcataaaaaaaccgcccaaatctctgacttcagtcaatagaatatgagcggtatatattttatttttcttcttggataatcacgttaattgtacgatgtgccggcccatcaaattcacagaaatatatttcttgagcaccacctcttaccatttcaccatctatcactggaaaatggcaatgatttccagtaagcattgctttcaagtgtcctgttggatttcctgctgtactaccataatctcgaagcattcttgcatggctatacggataatcttctggtattaatcgtcccaggaaattctcaatatcactttccagacattctaatgcttcgttcacagttacacctgttgttgtgtgctttgtaagaaccgtaacggttccattctgaactccacttctttttacaatatccaaaactttcggagtaattactgtatattcattatattcttttgttaataatgtaattgattcaacatacatcttctttacgcctttctattaggaattccacctaagaactcaattgcgttttccccacaaattaaatccaaagtactttcacgaaatcccagctctttaattgcatgtgccattctgatttgctcaaatctcggattattgcttccaaacattacctgatgtctcaaactccgatcaatccatgtcatcggaacatctcttgtcaacatctgtgtataaaactccttagcattatcaaaatacaatgcgccagtatctgtatatacattagtatacttcaacatcaacatagctgtctctctacaccatggccatccaaaatgtgcaagacaaatttttaattttggtcttgctgctgccagttcctcaaacatttctgggcgacaatattttgttaatgtatccggttcccatgacattccactatggaaaataattggtttttcatatttttcacaaatatcatacagtggcatcattctttcatccgttggataaaaatgccctttacctggatgtaatttcaaaccacttaattttaattctgcaaatgctttctccaattcttcagccgcatcttctgcaaacggatcaacccccgcaaatccaataaacttatctggtgccatgttaacaagttgactaatttcctcattacttaccagcacttttccaccttgctgtgtacgataatcttctggaagtaagcataaataatccaagcctgcacatttcatttgattaaaaatatgttccaatggcgccgttccatttttatgaatatctaatgtattatgtcttagttcttccaactctgaatcttgattgattggttcataaaaagctggatgaacatgcatatctataaacatatttctcttcctttctgtattttatcaatatctaatttctttttcccatgctctactctacccatggttcaaatacctgaactaccgaagccgctacttctgcacctttttttaaacattcatctatacttttaccattcaatattccataaagaaatcctgcaatgaaactatctccagctccaactgtattgactacttctgccttttcaataccacctacatagaatctttcaccatcccatgcaagactaccatcttcaccgaatgtgacaacagcaattttcattccacgactcactttatcttttaaaaactcttcaatcttagcatcccttccttcatgataagaataaaatccataagtaacatatggtaaggtttcttctactaacggatgatccagtctatctgcataatcaaaagcaattggaattccttttgctgcaatcttcggtaaggtattctcagcttttccccaaagtgctgtatgaacgagatcatgctctgccgcaaattcaatatcttcttcatcaaaaacaatattctccaatacaccttctacataatcgccatgcacacggtcttttccatccatatccatataagttactgctgtggcaccatcgccaatttttaaatgactaatgtctaccccttctttttttaatgtctctaacatccattttccattttcatcattacctgttgtactgataatcgaaacagggattccaagtttttgaagattcacacctgtatcaacaacattccctgttggatattttttcccaatacgttcataaacatcaatacaattgtctcctatttctgcaactctcattttcattgtcctccttttttacttttttaattctttcattcattgcatttttctacaactacatcatagtcatgatttaacatttttgtaataatctctgctacggcatcttgattgttgttcttctctgttacaaaatctgcttcttttttcacatcatccactgcatttgctacagctattcctaccgctgcatgctgcaacatgtccaaatcattatagtaatttccaacagttataatatcttctttacaaatttcaagcatatctgcaagtaactgtattccattccattttgacacacccttagccataacatcaatgcagttcggctccgaacttacgtagtatacctccggaatacactcatcaatataagcggccacatcggtcatatcctgtgttgccataaatccttccaagccatacttccaatctgtttcttcaagcgaattaattatttcaggaattacaccaacattctttgcatactctagggtttcatctgtcatctttgtaacttgccacgtcataccattataaatttgaagctgtatattctgctcaagacaatgtgtaattagccttttacacacatgcggaggaattaaatcattatgaagcacttttctatccttgcatcgtagtatctttcccccagtgttaagaatctgataatccacaagccattgttcatcctttaatgaccccatatcactatctcttctgccacttacaaatgcaattttatgtccctcttgctgtgctagtttaattgcttctttgcttttttcccctaaactagagtcgtcacgtacagcagttccgtctatatccattgctagcagttttcgtctcattttcttttcctttatcttgatattacaatgtttctcgatacttgtaaacaacctgcataaattcctttacacggttcacatcaactcgattttcaaagatacctccatacttaaatgtggttcctacaacagccgcatctgccgttgttaattttctttcaatagtatccacacgacatcctgtattacacaacacaactatttcaggattagcctcctttacgcttgcaattaatgtatcatctacatcttgaccagctgcatttgctgaaatacacaatccatctggtgctgctttcgtaattgtactcttagcaatctctgctaatggacgagtatctaaattccgatccgattctgggttaataaaatataacattttcaaatcttctaaagggagtgcggcttttcttcttagtaaactactaaaatcattattataaagtccaccatcacccacatacacaccacaaaatgttccgcgaacaaattgcgcttttaccgcagctgcaagttctaaacatgctcgcccatcactaattgcgtctactccatatggtaccttaatctcagatcgcaaattcccaattacatatgccattgccgcaggagtcaccatatccatatttcgctggtagggcaaactaaattcattgctaaaaacaatcccatctacaccaccatcttgtagtgcatgtaagtcttcacgtgcatgttctaccaccttatccatatcattttccgacttgtataatggatctcctggtagtggatcaatgtggagcattgcaataattggtttcttaactccaaacatcttttcagtccataacatctccttcgcctcctaaacaactttgtattttttgatacattcgatatgtataaattatatcacttgtatgaatattgtcaatattctattttaattatcttataaaaaaatatctataatttataaatgtacggtttttagttattttacacaatcttatcatattttttttatttttattgcatacaattccagttcgcggtataattcactcatctagtacatatacatattttatttttttaatacaaattatgttattccacttatttgcgtagctacagaccttggagagggtctataaacactactactttataatataaggaggtctatcttatgagaacacgtgttaactacttcacggaaaattctgtgcgaattcctaaaacggaattctccatgttaggtaatgaaatttttctccttacctaatcgtggcaattcttttaattctattttttactattaaaaaacaaacagataaggagatttttattatggatgccgtatatgttgggtggttgtctattcttccgcctatgattgctattattcttgcattaatcacaaaagaggttctattttcacttatagcaggtgttttatctggaaccattatttactctatcgcttctggtatgaatccgattgttggtcccgtttctactgtatttgacgttatgatacaaaaagctgatatgaatattatcattttctgttttttgttgggcggattagtttatctaatcaatgcttctggaggagctcaagcttatggaaaatgggcatcaaaaatcattcgtacaaaacgttcctctctattacttactagtttgcttggttgtttgatttttttagacgattatttcaattgcttgacagtaggaacagttatgaaacctataactgacagacatcatgtcagccgtgcaaaacttgcttacattattgatgcaacagctgcacccgtctgtatcatcgcacctatatcaagttgggcagctgctgtcggtagttatcttaaaaatacaggtgcttttgactctgaatttaaagcctttattacggctattccatacaatttttacgccattcttagccttcttatggtttttctcctctgtgtcttttccttggattttggtcctatggcaaaacaggaggtattagctgaaagaggtttcctcggcggacttgatgaacaaaaagattcattggcacagccaaaatctggacgtgtcgctgatatgattgttccaattcttgtactcattgtaactgcaatccttggcatgctttacaatggtggctactggagcaatgatccttcacttcacactatcaccgctgctctaggaaactgtgttgcagctcaagcccttgtttggggaagttttgctggaattattactgcattttttatgtatataccgagaaaaatcatgtcatttaaagaattcatggataactttacaaaaggcatgcaacaaatgattacttccggttgtatacttatgctagcatggacaatcggtagtgtatgtcgcgatttacttagtacacctgtttttgtgaaaacttttatagaaactaccggacttccaggtgctttgcttcctgcacttgtatttatacttgctgcattcttaagtttttccaccggaacttcatggggaacttttggtattttaattcctattataatccctgttgctcaatcaatttgtcctgaattgctactctcttctcttgctgcaacgttagctggaagtgtttttggagatcattgttctccaatatctgatacaactattctctctagtgcgggtgctggtgtaaaccatcttacccatgtttcaacacagatgatttacgctctaacagtcgctggatgtagtttaatcggatatttaattattggtattacaaatggaaacctactactttcacttggaacgtctattttcattctgtgtatttttactttcatcatgcatcgtcgttccaaaacaatattaaacaaaaaagatatttgttcaacacaacaaaacccaatgttatcactctaacataaagagaagtatacattatcgttacgtacatcctttgtttttagttttatattctctaaacaaatttttattttaatatgtactaaataatgaaatataaccattgacatttatacaagttatgatattctattattatagtgtatcttattttaactacttgtatatcaaaaaaattatggaggtgttattatgtcaaatatcacaatggatcaagtagctgttatgggtgtacaatattttcattatacactcgattattatcttaattccatgcatcgttgtggagttaaaaatctcgacttatggggagcatcgccacattattgcagattagattatctcacttcatctgccgccgaacgaaaacttcgtgagatcagaaaaaaagctgaagatttaggacttaaatttgtaatgtatacgccagaaactttagcatatccctacagcttgagtgctcctgaacaacctattcgcgatcgaacaattgattactttgatatggctattgatgatgcacttactttaggaacaactaggttatttatgaattctggttgtggtcctctcgatattcctcgagaagatagttggaagcgtgcagttgaaacaattagtaaagtatgtgaaatggcgcataaacgtggagttacaatcttacttgaacaacttcaaccatacgagagtaatttgttggtcaacttgccacaaatgaaagctatgttggaagaagtcaatagtccagcattaaagacttgtgtcgatttggtcgctatggaagtagcgcatgagaatcttgaagattattacaaggttcttggtgaagatactatacagtttatccattttgcagatggcgatccttccggacattatattctaggggatggtaattatccactaaaagaatacatcgaaattcttgaaaagcataactatacaggtattatcgatttagaaataaacgattcaatatattgggatgatcctcatagctcagtagaaagatctgttgattatctaaagaaaaatatatttaaataaatatttacttaatttaaatataagcaaaaggggttgtggaaaaagaataagtcccgaaaaaagaaagaccaagagttcataatgtggaactcttggtctttctgtcgccataccaacgcaccttttccggtttgcctgcaatgtgtcctgcaggtcctttccatcacatttctttgcttaagaagattcagaaatcacttatgtatccaggtaaaagagaactcgcttgaaggatttattatatcctatatcggcggtattaattgtaattatcttattattcttttagcttttgttaaacctatctccaggaatctgttttttgactaagcccgacgtctgcgcttttaaaaacagggttaattcctttctttaactgtgcttcataatcttggaccgctttaaatgcaagctctgataaaatcaggataaccggaacgttaatgagtgccataaccccatcagtgcatcggaaagatcccacaaaagagacatctccattcctactcccagaaagattgcaagtgccgataccagtctgaagcctttcataaaagctttttccggctgttttttgtgaatgtagattaaaagattgtcacaataaaaacagtttccgagcagagttgtaaatgcaaaaaataccattgctactgtaatcattttaaataatccagattatgcttcactaaaagcaacaattatcttaacattccccaaatacactccagtaatgttagtgcaaggataatgttaataacacggaaatgccgcagataaaacttctgaatcagtacgcccaagccagtccaagtacaggttgcgatcgttccgatcgttgcaataaccagctcaaaaaacagcaaagccggaaaggaggacatatattctacaacataacccgttagtgcggtaactccgaacatatagatcttcacattgacaaattgcaacatgaagcctttcagaaacgatgccgattgctctgcgttttctgttgacggcttgctgaaagcaatatgaatcgcaagccacaggatataaactgctccgatatacttcatcacttccattgcatttggaagcaaagaattaaccccatatacgaaaattgcacataagatttgtactacatagtaacctgcaaaaatcccaaagaacagcggctttccttttttatatccatagtttgttacggtatttaatgccaaaatatttcccggtcccggagtaaaggcatttataacgcaataaatcagaaaattgctcagcaccgccataggcataatcatcaaccacctttctgctgttattatatcagcaaacagcggtacatacataacacctattttatatgattatccatagcctatgactatggattggctggagcatatttccgtaattcttccaggtagctttttccaggttcgcttaattcctgattttcattcagcacatatccaatatgcattgtttcattttctgcaagcggaacggagatgatattttctccgttcaaatatttcgggaaaatgccacttgaaatagtataggcattcagtccaagcatgaaattgacaatagcccctctgtcattgacccgaatttccttatccaccggaatcgagctgaatagttcctctgaaaaatagacagattcatactctccctgtacaaagtttagccgcggataaggtgcgaggtcatggacggaaactacttttttcgatgccaatgggtgatctttttgcaaaaaaacatgaggctttgctgaaaatagttcggtaaacaccagatggttttcctctatcactttccgcatgacgacttcgttttcatgtgataaataaaggatgcctaaatcacagatacgatttttcacatcatccaatatctgatgcgttccggtttcattataataaaaagcgtatcgttcttgtccaaaacgcttaactaactccacaaaagcgttttccgtaaaagtatagtgctgagaagataccccaaatgtcactttccccggaagatttgtaacataccgatcctccagcagttccatctgctgtattacctgacgagcataaccgagaaattcagcaccatcttttgtcagagtaattccggttctgctgcggtgaaaaatggtgataccagcctctttttccgtttctttgatggagttggacagacttggctgtgatataaaaagcatttttgccgcttcagtaatagagccaacttctgctaccttcaaaatatattttaattgttgaaccgtcatttctttttcctttttattcttacaaatctcgatttctatgttgcttaaattccaaacaaagaatcaatctatgattgatttataataatttccattttcctccgatgagagatactgctgttgcaactgggcattccggtaattcttcttttgctcgcataattctcacctccaagtctattgtaatacattcaattttgaatgtacagttacaaaaaggtgcatacttgtttttgcatatgtctcacactatactaataccacgcaaccctgaaactacaaattaactatggaggtattattatggcaaattacacaaaaacaactattggaaaagaaaaccgaattgagctgcatgaaaagttgtctttaacaggtgcagaaatcagtttaaatgaactacctgcaggagcaaatgtcccatttgttcattctcataaagaaaatgaagaaatctatggaattctttcaggtaacggcaaagccataattgatggagaagaaatcagcctttcaactggagactggctaaaaatcgcgcctgctgcaaagcgtcagttttttgcatccgatatttccggaattacttatatctgcattcaggtaaaagaaaattctctggaacattttacagcagaggatgccgtaatcggctaaattaaaagtatttatttacagaaatgcacagctcccgataagctaagaactgtgcatttcttctttcttcaattttacgatttctcaatttttcaaacttgaagttttcaattcttttcaattccatctggcatatgatctttctcagttatcttacgaataacccggcatggatttccagctgccagactataaggtggaatatctcttgttacaacacttcctgcaccaattacacacccttctcctatggtgacaccaccgcaaacaactacattagatgccagccaacaattatcttttatagttattggtttcgcatattcaagattataaaaactaccatcttctctctttcggatattgcgttcttcaggtaataatggatgcataggagttgccaatgtaacatttggaccaatcatcacattatcgcctatatgtatttcacatacatctaaacatgtaaaattaaaattagcagaactgaattttccaaagaaagtattgcatccgtaatcaaaataaacaggtgcctgcaaatacggaagctcctctgttgttggcagtaattcttgcaatatctgtgcttgctcttctggctgatcttcatctgtcaaattatattttcttgctaatttacgcgcattcaggcgtagttgctccaattctttatctgttggatcgtatctctctccacttagcattttttctctttcagtcatttccaatagcctccaaattttgatttgttactcgcatgatatcgtgttttttcttcaattacagcactttttaacgtaaaaagcgtttttatatgatgcagccaacgacaaggagtcttagtaagtgaaatatcacaacacttctctatgatcctatgtctataactaaaactaatcttgttgtcttatgatttctgatattatcgacagcaacttatcaacctggattggctttgcgatatgaccattttcaatcttatcaaaacagttagaccagtcacatttcacatattcaaatttccatccggtatagcccgccagagcctgcatgagttcgtaaccatatcctcgtcttacaccgtttttatcagcataattgaaggtatcctcaaataaacagcttatcgcccctacaaatgtaaagttatcaattagcgaaatccaacaactcgattaacttatcgagaaatgcctcttccccccatgtattaattttgaaaaatacagcttggcttcctcccgctgtaattgcggaaagttgaactgggtctttgtcattttgaaaaagtgtaatgttaagactcactctgtttcctccggcatagctgtaacgctcaaaaacacgaacgctacaacgcgcagttccactttgaaagtcactggcatcttctaacgttgctgacatactgccatttattattccgttctcaattttggaaagtaactgttcaaaatcttcatttatatatctttctatttttgccatacccaacaccttcctctcaactatctacactgaaatctagagcactatttacttacctgtttttatttcattttaacttagcaaatgttataagtcaatttttaggttattttgaattttctaaaattcttttctctcaccctgtattttaccctttcatcttttgtatatatttcctttcttctgttgtctcaactatcattgggaaaagatctggacattctcatacccccgtatgactttcttgatttcctttgaaagaagatatttgattccaatgaattaaatcctttgattcatacaaaagtacacaatctccacctgaaagaatcataacccacttttcttcatagcgaaatacttttggatctcgaaaatcttctcttgaatctgttaaaatcggatttccagaatatttttcccatgtacgccctttatcataactaaacgctactccctgactttgccttttggtttcatgttcactataagtaaaaaatgctaccattcgctgattttcttcatccacaactgcactaccagaccagatttgtccaattttatctggtgcaatggctttaggtagtctcttccaacgcactaaatctttacttactgcatgtccccaataaatctgctcgttaatattatactgatgaaaaagatgatattcacccttataatataccaatccattcggatcatttataatataatcttctgctgaaaaatgtattttcggtctgtatttttccattttaacacctttaggcattcatccagctccgatgaatgcctgtctttctatcacttcttaaatttatttttttaattcaacaaaatctgctttcaactgatctaccatctgatcaaatgtatattctccactgaaatatccttggaaatctgctgcagcttttggttcataccctgaaggaaatcctcccattacccatggaagtgtcttcccttcatcaatatatctttttacttcttttgacaacgtatctgtgatttcaacatcagtctctgtttcagcagaggtcctgtacctttcggtgatatcattattgcttcgctcttcccgtaggagtcttcgcctgcacgagccggattatctccggtaagcatgttcctcaagatgtatcagctccctcaattgtcaaggtgcaatcggaagaactgtctgaacctcttttacgtttgtgatttttggaaatcagaggattttcaatttgccttccttgtactctgtctgtattgggagccacaaaatcggacatgattttagaacttttttgaaattattttttgaagtgtaaaaagacagaaaaaaagatgccaggatttctcctgacaccgtagtgactgtgccaacttcgtgcccagtgggcacaaggttggttgtattattcttcatttcctaatgatattggttctttctttgttttcttgtttttagatatcatcttatgacctgtataaatagtactggaaatctggaatatccttctttttaatatttttctgaggataaaaaagtaattccacctcttttggtggcatcatctggagttcttcaatcggaattcctcccgcgtgataacgttccataatcaaagataatgttccggatccaatcttataccgatccatgctagaacttcttaatttttatattatattggcttgaatccttttccacgcacttcattcgattccattgtaacaagaaacgctgatgaatctactttctttacagcttcttgaatcgtatacatttctttattgttacatgcacacattaatacttctttttcacgtcctgtataacttccttctgccttaatcaaagttgcccctcgttgtgatagctcatcaatttttgccgcaatttgtggtcccttttctgttacaatcaaagcaagttttccagcatcaacgccatacattagcttatctacgacaaatgatagaatatacgttccaattaatccataaataatcttatcaatgtttccatgcatcagaattccaccaataattacaataataaaatccataacaatgataatttttcctatagaaatatgtggctttgccttgtgtattgccatcaaaacaaaatctgctccacctgtagaggtatctctcatataaattattgcatatccgattcctgagaatgcactcatacaaatacaagataacatcatatcaccttgataaattggaaacaatggaacaacccagtccatcagtatattagaaattaacattgtctttattgatcttaaaaaaaattgttttcccaacaacttgtaacaaattaaaataattggaatattcaaaattgtcgtcattgtaccaattggaatttgtataactaaaatctcaactttccttattttatgcgacttggcggtatgccttgccactctatatgtatccttttcccttgtttttgcccttatgaggtatctacaagggaaagtttttcttattcgattttattctccaaccaccttatcaagtagtcgggctgagtttcgcttaccttctcggttagcgtgtgcatagacattcatagtggtacttacatccgagtgtccaagtaattcctgtacatcctttggtgctgctccatttgagagcaggtttgtggtataagtgtgtcgcagggtgtggaagtggaaattatcatcaagctccgacaatcgtttccttgctgtccttaaagctgtctcaaccgttgcaggggcttcgtatgctccgtccggtctgatacatacaaggtcaatctcgttgtaatcaagcggaatgtcctctgtgccatccaaatgataaagctcatagtagatacgattcttttccttaacttccctgtagtagttcctctgatagagttctccgtaactgaatacctgctttctctgttcctttttcgctttctttaagatgtcagcgagcgtatcacagaaatccacgatacggactttctttcgctttgtcggaccaatctcggtcttgtgccttgctccgttgtaacggacacttcttcgtactgtcagatactgttcctcaaagttaatgtcactccaagacagtccgcatacctctccaagtctaagacctgtgtagtacgctatctgtaccggcaggacagcaggcttgtttctttcttccagatactccataagcgtttgatactgctctggtgtaatcgggttgataacctctgcatcctcatcattatcagaaaacaaatccacatcttcctcggctttcctacgcattaccacatactgcattggattgaatgtgatgtactgctttggaaagactgcaaatcggaaggactgttgcaggactgcgtggaaagaacggatatagtcgatggtgtaaccctttgacttaaaatttccttcctcaccgccaaatgcaagtaaatccataaacttctgcaaatgctccgaagtgactgtctttagttttctgtttccgattgggtgttgtttaatcctgtttactgcctgtaaatagttaccgactgtaccgttgctaagtgaacccgttttcaaatcttcctctgcccatacatctagcatctgtccgagtgtgaggttgtccgctttggctagaaatttctttgcgtcataatcctccatagccttgcgtaacattttctctgtctctgatttgctctccgtacctgcaaattctttctgaaccaagttaccacttgcatcctccacataaaagcggtagtaccatttcttgcctttcttccttacagaaccttttgccataatcgtttctcctttcgatatcggcaatcggaactggtgaaatgcttcttgcgtgtaagtatatcatagctccgtctgcctatctataccgaatcgggatctttttctgataaaagattggctagtcgatttttcgctgtctcaggattcttagaatacagtcttacaatatcgcccatatcgttcaatgcgttgacggtgtgggtgatttctctaaggaacataatctcattgtattccttattggattcaaaccccattgtctgggcgagcattttgttatctgtatttcctttgaaattcttacaagcgaactggaacgaatccacgaacagctcgtattcccgtaacatcagtagtagcaggtctttggaaaaatcactttcggactgttccatatcataagggagcttattcagaatggaagtcatcacatcacgaatctgtaattctcttttatccgtaatgtctgtttcgtattcgtccgtctcacctttcagccattccacagatacatgaagtgcatctgccagaccttctaaggtcattttcttggtgttatcaatcgttcctgcttcgtatctctgaatggttgaggctgtcacgcccattttttcagcgacataaggctggttcaatcctaactcctgtctacggctttttgctctgctaccgattgtctttcgcaattctttatcttttaacatacttgcgaacctcctttttcggtatgtcattactataccacataacacgatatattgcaatacgcaattctataaaagatgatagaatttcgtaaggcttgacatagcgttataaaagatatatactttaatcagaattgcgtaacgcaagttttaaaaaaggctaatcttttcttcaaaaaggaacatcctctgatatacaagacttgtaatcctacgcaggaatgaggtgatcgaatgacagaattaaagtttgctctctccattgaagaagctgccgactatacaggtatcggaagaaacactcttagaaatcttgtggaatgggaaaagctgcctatccttagagtgggaagaaaaatcttaatccgcagggaacgattagacgagtttctgattctcaatgaggggaaggatttacgagacagacacgcagtaaaagcggtcaagggaacaatgaaaaatgaataagggacagtcctaagaccatccctctggtatgtatctgactaaaagccatgatatacctacacgcaaatagattatatcacggacaagtcctcagatacaaccagaacttttggaaaatgaggacaagatggatgtgaatgggtgcaatcgtccacccagttatagcttgttggtaggacaagtccacccaagatgcaaaaggtgttatgaatagtccacccaagccagaaaatgaagtgggtgcaaccatccacccaagtgaagccgactggtaggacaagtccacccaacttacaaaaagtgctgtgagaagtcataccaagtgtagctatgaaaaaagctgtccgacctatgacaaaaagtgtacgctactatgattttgagtgtccaatctatggggtacattttcaaagagttaatagtaaaaagctctattaaaatcaaaatgtaataaaacaatgcactattaaaaatgaaatttaataggaacttttactaccacttccttgccagacacagtttaaaagtaagcgaagtaacacaatgctattgtcagggcaaaaatgctaacgaatcgtgctattgttttttcgattttaatagcagacttctactgtttctacggtttttgctaaaaagtctgaataatagaacaatgctattgttaaggcaaaagtgctaacggattcgtctattgtttcgctgattttcatagcaatcttctagcatttctgttaagaaaagggagtgccggatacggcacataaaaagtgtgccattaaaggcacaaaattaggtgctgagggaacagttacagctaaaagtgaacttcataagcaagccctcggcgtttgagagcgaaatacacccatcgcacaaaacttcgttttgtactctgtgtatttcgctctgcgaggcttagccgccacaaggcggatgtgttcgcaagacgagtgcctatgcactcgctcacagggaaagtttactactcacatctcatctatcttatctgtcctcttttccaaaatcaaaactgggaaaggaggaaatcgctatgccaagaaattcatttgtgcagatgtcaaagctccataatgttcgtggaagaatctattatatctccagtgacaaaaaacaggaaaatctctatgcggtatatgaaaccacagaccgaaaattttggacagaacttgccaagtgcaatcaggcagaatttaagaaaagcggtacagagggaaaatgtatcgaagcaagagaatttatcattgccctgccggaatcctttgtggattatccgccagacggactattaaaatatatgacggataaattcaaaagtcggtatggtgttgattgtattgcagcactccatcataacaaacgaaagacgaattatcatatccatcttatctttgcagaacgaaattatcttgacgaaccgatagaaaagattgccaccagaaatatgttctatgatgagaaaggtaatcatgttcgtaccaagaaagaaatcctagacgagaatggaactatccgtaaaaggtgtaaggtgatcaagaaaggtgaggtctacgaaagacagatgtttaccatcaaggacgctcgctttaagcaggaacatttcttagatgaggtcaaggtattttataccgatgtcatcaacggacttgtcaaagatgagaaagaaaagctgtctgcattcaagcgtggggatgtctatcttgccactaagaaaatcggtaagaacaatccaaaggcagataagattacactcaataataaggtcatacaggactggaatcgtactgtggatcacgctttggtatcggggatggagcgaaaggaaatcttaaaggtaaagcaggaacagatttcaactccgattaaggaatccattcacaagtatggcaatcatccggagcttttgtttatgattatctttcgggcaatcgagctgttaaaagaactcataaagttgctgatacagaaacaggaacaacagaaagccagaatctccgaccttatggagcgaagaaatgaaaaacaagagaaacaaccagctccatccgttacacagacagacaatcagacaattcctgctgtgacccaaccattcaaagcacctgctactactaccgcagaaaagaccgttattccgccaagaccaagaatgtctgagctggcacacgattatgagatgcgacttgaagagattatggagaaacttaaacgacaaaacagagccattcatacgcaggaagtgaaaaaagaccttattgacgaggatttgaagaactgtacaggattattccaaggaaagaaacgaaaggaattgcaggcacagtctaacaaatacgcagaaacgattaagattatgaagcagggattatcccatatcgtgcaggattacaaatatccaacggtagatgcgttcctgcaagtctataaacaaggcaagtccgagtatgaatcctatgtcaaagcaaacaaggaatggaactccaagtatggagaaaactcaatccatcgaaagctggcagaaaaacaggcagaagttcagaaacgggaacaggacagagattttaactatcgttcgccatcagacagaggagctagataatctaattaaattcaaaaaagataaagaccatcaaattctttatcttttttgaatatttatgaaaagtcatcctgctatttaaagtgtctcattagatttttaattgtttcgactatcataagaatgattacgcagaaaaaggaataaaacaatgtggtattcatcttcgtgtttccaattttataaaacagcagaaatccaatgctaacaattatcacagaaataagtttatgtatccatttttgtttggtggttaaacatattttatggttacttataggtgcaaataatatacacataaggacaagtatcaaatatcctagtacagttggctttaaatagattatagcccacttatcaagacaaccgagaaaaaagctgcctaagatacatgttaactgcgttggagcatgggcacctccggtataatgtcgtaacaatgaaaaggtaattacccaaattagggtatagccgagtgtatgtgataaaactccccatacgaacaataacactatggttataaaagtattcaaaaaacattctaagccatatatgtatatttctaattgatccgcagaaacatcctccccggatagttctgctaacttattagcaatagatgtagcccacttcgtaatcattcaaaatccccgcttgtatcaaatcttgttgtatatttggcaaaagcacttatcacgtctttggaataagaacgtgcgatttgtgtagttagatgatttgacaattcaatcgttcctgatgtaatacgatagatatgtgccatatttacaatataagaacgatgggttcggataaattcacttggcaaatggacaataatcttatttagggtagacatttgttcatagcatttgccgtctacggtcaatatatccacataatgtaatctgctcgaaaatgtcaatatatctgcatagggaatacttacaatttcctgcttgtttcggtatatgtaggtattattagataactccttcgcgatttcatccaaacacagaaaaagagtattttccttgacgggttttagcaagtagtttaaagctctgacttcatatcctcggaatacatattctctaaaagctgttaaaaatacaataataccttgataaccagattcacgaaggcgtttagcaacctcaattccattcatttgccccatttgtatgtcaaggaaaaatgctgaagcctgtatagttgtgccttcagaattttttgaaaaatattcttcgcccgattcgtattcgtcaatttcaatatcccaatcatattgctgcccgtattttcttattccatttttcagccgttctgattcgatcacagaatcttcaagtatggttattttcattttcatagtagtttgttattctccttatccggtatcataatatgtacggaaaaaattttgttatcagatgtaatctgcaatacgccatctgccttttctacaagctcttttactcgtcttatcccaagtccatgttcttttccttgtttaacactcaaaatgtctccatcaatgctaccttttatcacaccatcataattattttcaatgtgaatcagtatcatattctggtaaggtttaatataaaaataaatgtatggatgctcggttggatcagagattataagtctttctcctgcttcaatggaattattccatatatttccaagtatggatgaaagctcaacagaatcaagcggaaaattttcaggagccataatagaatattctgtcttaattccgtgtttttcagcataatcaagttttgcggtaagtatgcagtcaatagcaatatttcccgttgctatggcactttgcgtagttgcaagagtgttatggtattgctctgtatatgctataagttcatcccatttcttgtcttttgctaatacgttgattgcatccacataaatctgcatatcatgtttcatttttcgtaatcgttcagttgtctcagataagctattgaactcagtcctttccagctcataaatcttttgttcttccagtaatcgtatgttttcttcttttgaataacctagctggtatatgtatagcatcaatactaaaaataaaataataaaaaacaagtcaaccaatgatagcctagctgaaaaggatgaatcaccaaatttatcaacagattccaaagtcagccttaatatgtagtgcccgattgcaagtccagaaattgcgatgaaaatatatgcaactttttggaacggtgaaagagatatgtctttgtttccaatagaatgaaataacaagacaaaaacagctatcattgccaaatataacatggtatatggcttccgtaatgttccacctaataatagctccagagacgctcctttataaagagtaacgggaataaagaacgaaatctgttctgcaactaagcaaatgatggaatacgaaaagccccaaaagatacggcgaattatactatcacgatagaacaatactgcatatccaatgtccaaaacacaagatgacatcaaagtgctgtaggatgatattcccattttattcagcgtgcataacacagcaaactgaaatgatacgaaaagaaacatcaaaactgcttgatgtttataatttgctcgaatacgcaattttttatggataaatattataaacaatgccagttctaagaaattaacaatatattcccatattgagtcaatatatagcatagctaccacttcctttaatcattctccgtcatattttatcatcaataaagtaggtacacaacataatatgctaccgtttgtgcatagtgagctaccattcatgcatagaggtattgaaaagtataaagattttgttatattcaaggtatactactacatcttaagtattctgagaatctataatatggagtggagatgataagatgtcgtactttaggaatattaacaggatatataatgtgtactagtatgtgttgcgtttcaattttcataaagataacctttaagaataattgaagataaccgttgttacatgattgaaaaggagtgaaggagtatgcattttaaaaaatctgttttaaaaaatcatttattgtatagcattataactttaatggctatagcaatgctatttcctattacggcatttgcacaagcttatgtacaaacatgggatcttgttgattctggcaaacatctagactatgacggaaacagcacttacatgagttatattaacactggggctgccacatggaatgcatataaatctggagtaatcagaaaagacagtgcttttgttgtagaagatgtatacgtaagcgatgtcaatgcttcgaatggatgggcaggcatgacatattctagtggtaaaattgaactcaatacctattatatgagcggttatagtaatagtaaaaaacagaatgtagcgacacatgaattgggacatgcattagggttggatcacagtacttcaacagatgttatggatgcagcaattacgggacatactagtacgcaggcattatctcaaaatgataaagattcatatgatgccgcatataataattattaggggagggagaacgctatgaaaaaatcaagtatctatggtattttgtctattgttcttatcgtaggaatgttttttacaggatgtgcatccaaaaataatgcaagtcaactgaatacaaatgtatctaacttgccaatccaccagatgcacgcatcttttgtatatgatactgataacattcgcgaagctgttggtatctgtgattacgtatttgtagcaaaggttgtcagttgcgatggaaccgagtatcgaaatgttataacgactgaagatgaaaaaggaaatcctaaggaggtcggttcgccttacactaattatactattcaggttctcgaaaatataaaaggtgaacttattacagataaacctattcctattgttaaacaaggcggaatttcagaaaaacaagatgctatttatctgtttgagaatgattcactgccttccgaaaattccatttatatctttttggcatatgcacaagaggatggttcgttactaatttctggtccaaattcaaatgtaatgtgtaacgattcgaatatgtattctattaattctgtctcagaggaaaaatcagttacagaatacgatgagtttattacatataaagatgctaatgataatgagattattccagttgatcgagagcgttataaatctatatatgagactgacaataattaatcattatttctgaaatatatagattaaagatggcaggtaggtgcttaacctatctgccatcttttcggttttatacctatatgtagaacagttcgtgcatgttgggctaccattcgtgcatagagagattgaaaaaattaaatactctgttatattaagcacataccatggtaaacaaataaagttgtctgtaattgtcagacaattaaggaggggggggggtgaaaacgatggacaataagcaagtaaacaaggcaccccagaaaagtgcccgtctcgtacttcaggcagtgactgctattgctcgaagtaatgcaaattcattgtgccgtggtttgttgtatgaaccaaaagtaccaacgcagttaaaaaaataagattgggaggaattgactatgatgttaaaaagtttaaaacagaagattgcaaaagtaggtattggtttgttttgtgcaggatgtgtatttctttcttcagcagcatattctcaggcggcatcttacaccgcttatgcacttaaactgaataagactaataactttacctctatgcatgcaaaaacaacatccgatgattacatcacaaatgaggtaacagcaattaccaatacctcttacgcaaatttctgggctgtcaataacagcaagagtaaaatatctaataagtataagcagggtgttggaacaggatcttgtaatttaatctttaccaagagcggttataattctactaacacacaggtcggtatgggaatggaaaattatcaatctcaattatcaactgcatttgtaagtggaaatgtagattttagataacagaagggatgggcataaacctcttcgtgggtttatgcccttttggtaaagattatgaaaaaaatggttcttatagaaatcaaacattgtattgatcgtgcagaatataaagttgtttttattgctctaatgattttaaatattgcttcgtatattttatgtgtaaaaaatgatataggaaaaagttatcaatttattcgttcagcaaatgaaaatttcgtattacagggcactgaagcggcatatattccatatataatgtatctgttattgcctgtttatgcaacaattattgcatcactttccttaataagagaagaaaaaagcaatagttcaatcctacttattcaaagaatcgggaaaaagaaatatttagcaggaaaattatttggcattctgattgtaacctttttgacaataacaataccaatgctcataaatttattattatgccacttgacatatccaatacatggatatgacagtgcttggggagaacctgattacgctataggtttggtatcatataacgctgacaattttcttgatatggtgagattgcaacatccaactttatataatctaatatacatttttaattacggaatttttggctcgggattagctatcttagcttatgctctttcatattataacaaaatgaaagttctatatttcgcaaagatacctggtgctttgtttatattctatattgtttttaatttgattgtttctgtctttgggctaaatgaattctctatacaaggttatattatgcctaatgttcatggaaatataataggagaaattgttctgatattgcttatttttggattaagtattggcattatacagagaaaaataaaaaattatgaagttatataagaaaaaaattttgaatgttaatgttggaaaatgcttactagtatcacttataacatttgtaattagatatttttatgctaatgtgtacttggggtttcataatagtctggttacaataacagaaggagtacgttcacaaatatattttgggggaatactaatagatcattcgtttgaccttatatctttatcattttttgcgattttgtttatccttgagatttgttatcttacaatggacttatttaatgatgcaaatgataacatggtaattctacttcctcgttatgggaaaaaacacataatttataaggatatattaataaaaatgatattacgtgactgtattgtagttgtttccgattatttgttttttctttttgtagagcatacctctaatggcttagaagatttcaaagttatttttatgctattgatagagatttttcatttgcaaatgattagttatttgttttcattttggaaagattcaattataggatacatcgttgcatttattgtattttttattccagtaatggtgtgtggattttatttttcaatgggaaatgttatatggaaaatttggcattattccttgctacatattcctttatttaattggcataacaagcttattatatattatgtcgaagaaaattacgaatggactacaagcaatatagatttattgaattttaagtcaagctgtctcatttcagttatatcatccgctgttttggtgtggataggtaaatttctttgcgaaaaaaaacaaatattgtgaggtgaatgatatccatgaatttatatgtaaaatctatttcaaagtcaattaaaggtgaaaaagtgcttgatgatatcagttatacatttgaatctggtaaaatatatggaatatatggtaaaaatggttcaggtaaaacaatgctactcagagccattgcaggttttataaatacagacaaaggatacataaaatataatcacaaggcattacataaagatatggatgttttaccagatttaggagctgttattgaaaatatttctttttggagtatgtattcaggatttgaaaatttgaaaatgctttccaatataaaaggaattgtatcagatgaagaaatatatgaaataatgatatactttggtcttgatcccaaatcaaagaaaaaagtaaataaatattcattaggaatgcgtcaaaaactagctctttgtcaagcactgatggaacatccaaaaattttgcttttggatgagccaactaacgcattggatcagcatagcattgatttatttcgtgaacgtatattggaagaaaaaaagaatgataccattactatactgacaagccataataaagaagatattgaaatattagcggatgagaagatatgcatggaatttggtaaaattaaggagttgatgtaatgaagaaatttgtattaactatctgtgttgtaatcatttgtatggtgacagccttattctatggaaagactgggataaaaacaactacaggggttcatgatcctgatattgctttatcagaaaatacagctatggaaattttctatacaggagggcagaaaacttcttactttaacaatgaaagtaattactcattggatgatatggaaaaagattcttctttaatagctcgtataactgtaacaaattctcgtgaaatgagtttacgatcaacaaaaacaatggtaaaaatagaggaaatctataaggataattctgctaatctttcagtaggtgactgtatttacattatagaacctgtatcatttgttagaggtgaagaattttacactaacggatggcaatatctgaagaccgaagatacttatttaatatttttaaaaaatctaggatgtattgatgggtataaatacaccaaagaggaagaaaattcatttatgcctgtatcggaaatatattcaaagagaaatctaactcatgatgaaagttgtgtggtttttgattcggcggaaactctctattcaagtatatctatgtttgcatttttgacctcagaaaaaactatagtagataattatgagaaaatatggaaaaacattacaaattcaggtaagtatgaatgatttaattatttatgaatgaatctctcctattctatttcctgtgagaagcgtatcaatgttagaaattcatggagatactgaattaagcaatatggaatcattcaatcttaaagaaactaaaaatggagataatagaaattgaataaaaagaaattggcaaagagtgttgtaggcattgctttaattgtaagtgtagctatacttatcgttgtatgtgttggaaaaataaagcacattcagaataaaaaaaatattattggtacatggaagaatgcaaatgcagaggaagtgtttacctttcaagaaaatggaggacttgttgtaaacaaagatatgcccgaattgggtattacctgtggcaatgcattatatagcatatcttcctcaaatatgatttttgtggaacagagagataatagcgtgaattttgagatagaagtagatcaaaacgaattaacaatcttctttatgggtcataaatattgggaattaacaaaatagcaattgcatataaagcgatactcatgatatccataaccataaaatatagagccgatgaatcactcgttatttcgattgtgagttatcggctctatttcattatttatggaagggctaaagaaatatcgtattttatagaaatacttttgacagatttcttctcatttttatgttcttttatcaagtgctataccattccatattcatcgcattcacccaatcttgcatttctgaatcaagatacaaacgggcatattctagtggattgtcaatcgccagtgcatccaacattcgttgagagttaggagtagtaatcaatccatcttctgccttgccacagtcaatccgaagtatgtagccattgtaataattgatgtctatgatgttgtgatatttattatattctgcatgaacgatattcatattgcaaagtcctttctcttatctgtttcagttgtagaagcatcttgaccagttccagccgattatgtgatttatataatgttattagctgttaccggattttgcttcccttgtttttgcccttatgaggtgtcgtaacacaagggaaaaggatataacataagggaaagtctaagggaaagctcacttgccaaaactgtagtaaaatcaaggcattgcggattttatcgtaacactttataataccagttaggtgttaaagaattgtaggtatcaaaatttccattttccaaaaataataaaacacgattgcaatacctgatatacctgctaccggaaatccagatgccactgcaaaattatagactccaatcgcaatgaaacaaccacctacaatatcaagtaaaatatcaattaaaaatgtctttgcctttgatttcaatgtgagttcctccctattacggaatcttatttcttttgcatcacaatacattgatatgtttgcagtattattgaacctgtaaggatttcatcagtaatcaaatttgtataacattcattcaaaaccatcttcacaggatgtctgttaaaattctgaagaaaatatacatcatctttctgttcttttccacttctttttgaaacagtaactccataaggtaatgtttccgtcaaatttgcttccacatttgcttcctcaattacatcgcccaaaaattctttcaaaaattccagatctggttgaacagcaacatagtaagcttttcctttgccatacgcattttctgtaattgctggagtatttacattgtaatcttgcaagtatgttcccaacggctttgcagtttgaagtgtcacaacttctcttaacacaccggctttatatacaccgtctttataggagaaagtatttggaaaatattcattccccacatcaatctcatcaactgataatcctagcaatctctcatgtggtctctctccaataaaacataaatctgtttcatttactactccactccaataagttgttacatatattccacctgcttccacgtatgcttctactttatgaatatactcttttttatgcaagtataaggtcggagcaaccacaagctgataatctaacaactctcgatccatggaaattatatcaacttcaattcctttttcccaaaaaacccgataatattttaaaagttcttccgtataatcaaattttctcgatattgcttgtgcgtcagaaagagcccaccaattttcccaatccataataatagctaccttcgccctattacatgtacttagtatttgactgcttagcttttctagatctttgccaatccaagcaacttcttgaaaaactctattcttttctgacgcatcatgatcaacaaccgctccatgaaacttttcactcgatcctctgctttttctccattgaaaataaagaacactattcgaacctaacgcaattgcctgcattgaagataagtaattcatccccggtctttttacattattttcctcatcccaattcacaagtgatggtgttgattccatcatcaaaaatggcttcttctgaaatcctctcatctggttatgcataaaggctgcccacacagcaatcggtacttcatcttcttttgtatgccaactcggataagagtcccaagaaatcacatccaactcctctgcccatttatcataatccaatggtgaaaaatacatcatcatgtttgttgtaactggaagatccgaatatgttttaacagctcgaatctcttctctacaaaagtcctgtaactgttcgctcacaaatcttttccagtccaatttcaaaccgtgtaattcatcctctcccctcggagaaggtgaatgaatctgttcccaatcggtataagtatgactccaaaacgcactccaccatgcatgattcaatgcatccaatgttttgtatttttttttcaaccatttccgaaatgctttttgacattcttcgcaatgacaagaagcatccctaaaatttcctccgtattcgtttgatatatgccaaagaattactcctggatgttttccaaagcgttctgataatttcaaatccaactttctagttttttctctcataacagcagacgtgtaacaaaaattatgcctttttcctggtaaattctgtatcccgttttcatctgtctgcattacttcaggatatttttgagtcatccaatttggcattgcacctgttggtgtagctagatttgtatagatgccattgtcatataaacggttaattatttcttctaaatagtcaaactgatattttccttcttctggctctaaaaatgcccacgaaaatattcctagtgaaacattatttacatgcgctaatttcattaaccggatatcctcttcaagaatatccggtctatctaaccattgttcaggattataatctccaccatgcagaagacctggcatatttatttttttatattccatttctaatccctttctttatagatatcatttattattttacagctccagtaataccttctgcaaaactcttctgtaaaataaagaatactaaggcggtaggcaatgtacatattaagactgccaacataagcattccatagtctgttacatatccctctgtcagatttgctacaaccattggcattgtcatgctcttggattctgtcatgattactttcggccacatataactattccaagcattcataaatgtaatagtcatagccgctgcatatgttgatttcattgtaggaataaacatctgaaagaagattctaatttccgaaagtccatctaatctggcagcttcaataatatcaagaggaaatgatcttgcactctgccgaaacatcatgattaaaaatggagttgataccgttggtaaaatgaatcccaacgcactatttaacattttcatttttgcaaccatctgaaacaatgggaccaatgtcgtaataaatggaaccatcattgcaagaagaatcacatccatcacggcatcttttgctttatcatgataaatttcaaatccatatcctgccaaggaacatatcaccatcgaaactattgtaagtaatattgcatatttaaatgaattgaccaatgcagcccctacatcttgatttgccagcagatttttcaagttttctcccaaatgagagccaaacgataatacaccttttgctacatccacacttttgtttgtggatgcacttaccatccagtacaaaggaaatactgaaataaaagtaaccaaaatcaagaatgcatacattcctatatttttcatttttttaatcacgtttatcacccaccctcatttgtataaatgctaatactgcaaccaacagtaatatgaagaaggacatcgctgctgcatatccaaaattcggcacatacttaaaacataaattatatatgtaatgtgacatagagattgaagcattcgcaggacctccatcggtcaagttaactgattcatcaaataactgtaatgttccatttgttgacattattgctgttaacaagatagttggttttaataatggaacagtaatcttaaaaaatgtctgtattgctgatgctccatcaatttttgcagcttcgtatactgaatattcaatgttttgcaatccagaaaggaaaaataccatattatatcctgtccatctccacaaaagacccaataagataaccatttttgccgcaaatggttgtgtcaaaaaattatatggtttatccaaaattccaatattcactagaacataatttactaatccattatttgcaaacaaagaccgaaaaataattgaatacgcaaccaatgaagttgtacacggcacaaaaatcattgttcggaaaaatcctttaaaccgtaagtcttttttatttagaatacaagctaacaccaacgctactacaagcataatgggcacttgaagaatgaaataaaaaaatgtgttttttattgactgaataaatacatcatcttgaaacattctgatgtaatttgtaaatccagccatctgcatatttctacctttccccgtctgaaaagataaaactaacgctttgatcattggccaaaaactaaacaccgcaatcaaaaatgttgctggtgccaaaaaagcccatcctgttaaattatgctttttttccaacgtcatttttcttagtttgttagacacaaaaactcctcctctctatccataagggtgatggttctacattccatccccttgtatgataggaatctctcttactgtcccatattaaaattaacagtatcttccgtttttttaagctctttctctaaatctgcaccatttgtaatatttgttgtcgcaatagagattgcgtctcttgcttcattgaaatatggccccgtaataatagaaggaacttttgttgaatagtcaactattttttcaaacactgcatcaccagagaaaaattcattcggtactgcatatgcatcagaatctcctgctggtgtccatgtagaaattgctccacaagagagaatattatcatataactctgtacttccagcaaatgtagacgcaagaaaatcttctgctaactctacgtttccacaattccctgagattgcccaggaagaacctccattatttgaatagtttgtggcaccctttacatttgtaagttttggaatatttgtaatagcccattttcctgactgatcctcagctgtctgaattgttcccataatccaacacccattaatcacacctgcaacttcattgttcaccattgagccagtgtattcatcccagttatttacttcctgtaacacacctgaatctttcattttacaatatgtatcaattaccttctttaaagtgtcattttttgcaatattcgttgttccatcttcattaaacaaagatgctcctgcagactgtaacatcatcgtaagcaaatcacattcgcctgctgtcgttgtcaataatggttttcctgttttttccagtactactttgcctttttcaatccactcatcccaagtaatatctgtaaaatcttctaaagtcattccagcttcttgcaaaatatctgtacgataacaagcaattgctactccgttgtcaaaaggcactccatagtgttttccatctacaacagaaaaatctgttttaccagaaggaaattctgaaaaatcaattttcttttcagaaatttctgtaaatacatctggataagatattacatttttttggaatgactggtcaagcatcaaaaaaatatctggcaatgtgcttagatctcctgatataccagccgtagtaagtctagactgtacatctacatctccaacttcgacaatatcaattttcacatcttgatgatcttcttgataaatttttgcagcttcttccattgcaaaaatattaaatgttttgtcccaacaccatactgtaattgtattatcgtctttattgctttcactttgatttccgcatgctgtaataccaattgccatcgtagctgccaataaaattgccactattttttttctcatttgttatattctccttctaccatgcccctttataccctatccttctttacaaatcccatcaatcaattcattaatttgatttctcagagcaagcgctccattcacactttcaatctgtttctgttcattaaatttcaacatagtgttttccctttcccttcttttatattggtgactatttttaaatttaatataccatttttttcatttttttcaatatttcacgcaaagaatattgaatattgttgtatttttataaatataaatgcttttttttatacacaatgcatatatttcttttattctggtatgaaacgcatttcaagtttactataccagtttttatatttattttttatttattcatttcttttttcctttccatttgctttttaagaactgacaacatataatttgattataatttacaagtaaattataatattaggagttcttatgaaaaaaaatttattaactttagatgttgcattatcaaaagaaatcaaatacatgctaaaggaagaacactatcttccaggtgacaaactgccttcggaacgaaagctggcagagctgtttcatgtacaacgcttaactgttcgtggagccttggatctgttacttcaagataaaacaattatctcaaaaccacgaagtggttattacgtagcacctaaacgcattttacaatccattcgtaatttttccttacattcagaggaagatagcggacaattaacttacgaattatatgatttcaaaaaaatagaagcagataactatcttgcaagcgaaatgttacttcctgaaaaatcgaaaatatacaaaattgtttggctttattcagatgatactcaactaatttgtatcaatacaacttatattcctgaatatatctatccagatctcacccaacaaattgctgcttctgctcctgcaattgatttgattacaaacaattgtcaaataaccttggcaaaatcgaatcaaaaagtcaccttactttacgcagacacaaagactgctcaaattttaaatattcctgttaatagccctttaatgaaatacaaagggctcatgtatgataaacaaggacatcttgcagtcttttttgaaaataatatgctaattgatcgttttggttttatcagggaggtagttttatgagcaatgatgatgtattagccgcacaaataaaatctagtatcattacaaaaattaaaacacaggaatatcttcctggggagttgcttcctagcgaacgggattttgcaacaatgtatagtgtaagtcggtatttgattcatgacatctttgacgaattaattagccaacattacttaattcgcgttcaaggaaagggaacttttgtccgcaaacccgaacaaaatcgagttgctttaggagtactaaatgaatcaaaaaatgccagctttacctctttagttcgtaactttggtattgaaatttccaataaatgcttaggcacaggtataatcaaaaacaaaaaatactttgcagataaacttggactttctgaagaagatgaaatatatggtattcatcgaattcgtcttggaaacaaggaacctcttgcaattgagtttacctatgttcctattcattttttttcagatatcgataattacaattttgagcacatatcgctttatgattatatgaaatccaaaaatcatttgcctgtaaaatttaatgagacaatgatgatggtagaagctggcgaaaaacttcaaaagcaccttcatcttccaagtgccacctctatcgtcaactatattgaattcataggatacgatgaaaatggtaatttagttgaatatacagaaagttattcacgccctgataaacttgaagtgcgctttgtcacaaatgatatctaaattaactttaattttaccatttagtatatgtatgcaccataaacaaaacaagatagaatatacacaaaataatcttttgttaggggcggggaaaattgaccacctaaagccgcttagaattaaccatttttagtcagatagaaaagtcattgtatttttctcttcatgtcctaaaatgatgtatgccaatgcatcagtagaaatcacaatggaagaaaaacacaatgacttaactgaaataatagtctgataaatgacattcactggctcctgcacgttcatatcactgtcgagactttctccctttgacagcttgcatcaaatgtatctttaataacaagaatcgtttccataagattctggttgtgaataactatttttttaaataaaatattttttctacgaattgcacaatactacatggttttaggtggatccttcagttctttgatcggatattttgcaacaatggacaatccttgcattaacatttgaaactgctctggtgtaatttccatagcttcttcttttgtacgcggccagctaaagccaccgatgttcaatcttttataaagaagcaagaatccatcgccttcccaaacgagccctttgattcgatcggtgcgttttccgcagaacaagaataagatatgcttttgaaaaggatccaagtcaaactgaaatttaatagtagatgccaaaccatcaatcccacgccgtaagtctgtataccctgtagcaataaaaattttttcaaatccaacagcatcattaagcatggagaagacctccaaccttgtttagaagttcttccgtagctgtatttgatatttcaattgaaacagcgcctcttcggataacaacatccggtttaaaaggactggtagatgaacttgcttgatcagtcattttgatttcaataaaatctgtagttgttggagttggattctcttgacagcaggcgttaaggtgctctctaatgtagtaaggtatgcttcttctcggagaattcgttgccagtaaaaaaaggatttgtccgaaatgccatgttctcgacaccaggtcgttttaggcattccactagcaagacattctttgatgatacttgtccattgttcacaccggactttatgagttattttattcatgagattatcctccctctaaaaaaccttagattttttaaagtaattatctcatgaaaactagcaaaaatcgtggtacctactatttaccggttctttccattgttagttgaattcacagcgaaagtgctcgtgtaaaagcacttttgcttttaataaatcaaaactatttcgtccgtacataattctcttaattactttaattttgttgacacttccttcggcaagtccattattatactttaattttatcccgttttttaccgcattaatatcaattcttatgccgttaacataggtctgtagctcaggtatgttaaaattttctattttttcaagccatgtttctaatctttcgtcgcgccttgaatatagtatttcatagaattcttttattgcagcatataattcagtaatcactgggtacgttttaagaacttgctcatattgtgttttggtaattgtcttgacatcacttaatcccttatagattaattgtatcaaagatcttctctgaatgtattctttcgattgataatccgagcaggtctcttgttgacttaaatgtgcttcatttcgaatacgttctttttgaatgaacatccttaaggatgcaactgaacctttataacctttttcggtaataattttatgaatattgggataagtcattccttcgcttcttaacttaattacttcagcttcatatggtgcaagctttcctggaatacgagcattataatgtccatcttcaacagaataatctggagataaatatctttgtatcgttttacaggtatgatgcatagtcttggctatttcttctataggcacccctttgaattcaactaacaatggaaagaacctatttaccgtttactgtccatgaaactttttccaaagaagaaaaataagatatttggtagcttcaccaccaacacctgcgaaccaataacgccggtactggatatcaaaatcccgtaccggcgttattgattgtaattcttttttctactcaagtaaacagcttatcggccctacaaacgtgaagttatcaattagcaaaatccaacaactcgattaacttatcgagaaatgcttcttccccccatgtattaattttgaaaaatacagcttggcttcctcccgctgtaattgcggaaagttgaactggatctttgtcattttgaaaaagtgtaatattaagactcaccctgtattttaccctttcatcttttgtatatgcaagagggtttgtagattaggatacaaacaacttcagatgaatgtttttataaacaatttccttcaaatcaggcctcgtccaacgggtgcttcattatttcatccatctcataaattatacttttttcaattaccaaatctcctcctgttgcaaataatttaactttataaaaatcttccggaaaaagtaagttcgacataacaacctctccgttattaataaataattcgctctgagaaacatccattagaagttttatcgttaaaaactcctgtgtaaaatctacaggtgctttatattttcctgcaaatttatcatgaggatttactcctgctgttgttctatcaacaaaacaacattgtttttctttacagaatacaatttcaaattgtcgattttttcctgttgaaattttaattccaaacgtttgcgcatgaatcttttcaatcggataagatatatctagttctagcacttctttcttatcgcacagcgtccactcttcatccgctcccatctttatgtttttcatttcatgcttatttgttcttaaacactccatttctttaacaggtaattgctttaaaatatattttttctctttttgcactaatttcaattcacggacacaagacatctgacccttgaacggacttgttggaagataatctctgtattgccaattatcagcccatgcaatcatcaatcttctgtctttaggtacatgattccacgtaactccagcataaaaatcttttccataatctatccaaagacctttctcttggtttgaatctgctataaatttttgaccatcgaattctcccacaaaatactgcattcctgttccacctgctggagatccatcattaacacttactgttaaaacccatttcttttcttctgttgtctcaactatcattgggaaaagatctggacattcccatacccccgtatgactttcttgatttcctttgaaagaagatatttgattccaatgaattaaattcctttgattcatacaaaagtacacaatctccacctgaaagaatcataacccacttttcttcatagcgaaatacttttggatctcgaaaatcttctcttgaatctgttaaaatcggatttccagaatatttttcccatgtacgccctttatcataactaaacgctactccctgactttgccttttggtttcatgttcactataagtaaaaaatgctaccattcgctgattttcttcatccacaactgcactaccagaccagatttgtccaattttatctggcgcaatagctttaggtagtctcttccaatgcactaaatctttacttactgcatgtccccaataaatctgctcgttaatattatactgatgaaaaagatgatattcacccttataatataccaatccattcggatcatttataatataatcttctgctgaaaaatgtattttcggtctgtatttttccattttaacacctttaggcattcatccagctccgatgaatgcctatctttctatcacttcttaaatttatttttttaattcaacaaaatctgctttcaactgatctaccatctgatcaaatgtatattctccactgaaatatccttggaaatctgctgcagcttttggttcatatcctgaaggaaatcctcccattacccatggaagtgtcttcccttcatcaatatatctttttacttcttttgataacgtatctgtgatttcaacatcatcataattgttgaatgccggaacaaaaccaaagtcatttacaacgatctgtttaccttcgtcagactgaaacagccattttaagaattctttagatgcttctttttctttatcacctgactggctgtttatacaccaataaatggagattcctgtaggaatgcaatcttcttttacccctttcaacggaatcggaagaattcccattttatttgccacctcttcatcaattccactcaattctggtccaatccaatttccctgctgtacaaccgcaactcgttcgatagcaagacctcctccgatttcacttgaataatccactgcatttagtttggaaagatcatcttttgatgtagtatactttgtttccaaatcaagaagagcctttaatgaatctgcatatttcaaaccaagttgatctgaatttcttaattctgttgcacttgaatactcacatgccaaaggcgcattcaacgtatgaagtcctggaatccaagtttcctttgcagcatattcttcaacagcttcaagctgtggatacttgtcctttaactttccagaatcaatctgattctgaagatcagcaaacgccttatctatcgcatcatagcttgtcaatgtagaggcatcgattcccgcatctttaaaaatttctttattataaactaatccgtatccttctacactaaccggtatgggatactagcaaggaagccattgaagcgaggacagcggaaatcagtaaataccttaccaaagaattgcaggacttgaacgccgataccatcagaacggacataccaaccagtgcgaccgttacaaatgtgctggtctggaatgtaaagcagtctggaacggacgattttaccgttgcctacgaagtagatcagcaggtaaaagagggagaacagacacaggcagtcacagaaaactataccgtgaccgttcatgtggataaggacggtgcaatggtcattacccagaatcctacacttgctccggcagtgcagaaatcaaagtatgaaccgaaatcacaggaagccgatgtcagtgtcagctacgacacagttaaggacgctaccgctttcttggaaacattctttaagctctatccgacagctacggaaaaggaacttgcctactatgtcaaagacggtgtgattgctcctgtatccggcgactatgtattttcggaactggtaaaccctgtctttaccaaagacggcgacaacctcaaagtcagcgtgtccgtaaagtatctggataacaagtcgaaaatgacgcaaatctcacagtatgagcttgtgcttcataaggacgataactggaagattgtagaataaatgttacagcagagtagtatggtaattgtttatccaatctatactattctgcttacaattagattgacaaaataagaatccctctcatataattggttgcaatggtattgaggaaatacaaccttaaatgtataatgggaaagtagcattgcaggaatgaggtaggctaatgaataaaatattgattattgaagatgatttagaaataaatgcgttattggctgattttctaaaagaaaaaggatatgctgtgcattgccaatatgatggacttcatgttctggattttttgaataaagaaaaaattgatttgattatacttgatattatgcttccttatcggagtggtgatattattttatctgatgtacgcaagaaatttacgatacctgttattattatttcagcgaaagaaactacacaaaataaaatcgacttgcttcgtctaggagcagacgattatatcacaaaaccttttgatatggaagaagtgcttgccagaattgaaagtaatctgcgaagagtacaatttcaaaatagccagacagaatgtttgcaatataacaatctgactttagacctagagaaaaatacagcatttttgaatggaatagaattatccttaaccgctaaagaatttggcattttagaattgttgatgaaatatccagataaagtattttcaaaatcgaatctttttcaaagtgtttgggatacagaatatattgctgaagataatacacttaatgttcatatcagtaatttacgcaataaattaaaagcgatatgctctgatacagaatttattgatactgtttggggcattggctaccgcctacataaagctaaggattaaacgttccttagctttattatttttttaacttttctcattacgatttaagaaattctttaaaattgcccgttatactggtttaagtaaaggaggtttgggatatgagttcaattattttagaagcaaagtctttaaccaaagaatataaacaaacattagcattagaccacataaatttacaaataaaaaaaggaaaaatttatggatttattggtcaaaacggagcaggtaagactacttttttaagattagtcacagggcttgcgtttccaacaagtggtacactttctttatggggaaattctggaacagaagaattgcagaaacagcgtaaacgaattggaagtatgattgaaacgcctgctctattcccgtcaatgactgcctatcaaaatatggaagtacagcgtattcaacgaggcataccagataaatcagttattaaaaggacattagatatggttggattgcaagatacaggtaaaaagagtgtccgcaatttttcattaggtatgcgtcaacgattggggatagcgattgcacttttaaatacaccagaactattgattttagacgagcctatcaatggtcttgaccctgctggaattgtagaaatcagaaatttattaaaaattttgaataaagaatatggtatgaccattttggtttcaagccatatcttagaagaattgtatcaaacagcatcagaatttattctgattgaccatggaaaaattatagaagagatttctgattatgaattaaatgaacggtgtaaacgacatatagcaattaaaacaacagatgttcagaaaacggttctggttttggaagagaatcttcatacagataactttaaactaatgccagatggcataattcgtttgtatgattatttgaatgatttagagacagttgcgtctgctttggcagaatcgcacattcttgtaacaggactttctgtatctggcgatactttggaggactattttttgagcaaaataggaggaacaaaagatgtcaaatctcctaaaaactgagttatataagttgtttcacagttggtatttttggggaattggaatattcaatctccttttaagtagcatattgctgttagatagtaaagaacgctcttcaaacttaattatggcatcattatacaatattccgttactctattttttgagtatagtgtttatagcattgttcattggaagtgattttagtggaagaactttaaatacttatattactgccggacataaaagaagttctatatttagagtaaagttaattgtatctcaaataggttgtattatcattctggtatttccattatttgtacatggaattattagtcaattttatattggagaaaaacttttttggaatgatagcacatatactatggttttactaactctgtttgccatgataacactgtgtgcattaccgatgttttttgcttttatttttcgtgatatggggaaaacactgacagttgcaacggtgtacaaaggaaacataataaaaaacttaataatggactgccaatcttacacaaagtaccgcccaaacgagactacgggcggtatttttgtatcatggcggagaaaggaggaacttcccacgggggcttgactgaaaagttgagccccttttttcatgccaaaaaacaggaggtaaatgcttatggcagatgataaaaccacaaaaacgccggaacagccggtaacggatagcgggccgggcaaggaaacgcctcccgctcccccaaaagagccggagaaggtttccgtttccccggagccggaaaaaaagacggaaccggaggtaaagaacccacaggtttctgtctataacttcgctgaaattatgaaggaaaagaaagtcgaggaacgggcggcagctcccagcggggaaaagcctgtcccggcaaaaacggaaaaaccggaaaagcagccggaggctccgaagaaagcggaggaaaaacccaaagagccggaacagccgaagcgccggggccgtcccctgaaggcagataaggacaaggacgcagccccgaagcccaaagcccccgcacagaaaccggaaaagacggtcaaaaaggagccggagaaaaaaacggctccaacggtgcagaccgctcccactccgaagaaacccgaaaagccgcaggatgcaccacgccggggcaaggagcagatcgtctatatcaagctgaatgaactccacgccttcaagaaccatccctttgaggtccgggatgatgaagaaatgcgggctatggtgtccagcgtcaaggacaagggcgttacccagcccgctatcgtccgtccccgtgaggatggcggctatgagatcgtgtccggccaccgccgccagaaagccagtgagcttgccggatatgcggatatgccctgtatcgtccgaaacctgacagacgatgaagccatcacccagatggtcgaggacaatctgaaccagcgtgaagaaatcctacccagtgagcgggccaaagccttgaaaatgcagcttgaagctatcaagcaccagggctcccgcacttcgggccagattgacccgaaggacgctggcaaacgctccaacgagatcgtggccgagcgcaataagatggcggtcaagcaggtgcagcggtatatccgtctcaatgagctggttcccgacctgatgaagttgatggatgaaaaaaagctgggctttactacggcggtggagctttcctatgtcagcaaaaagaaccagaactatatcgccgttgccattgacagccagcagtcctctccttcgcaggcgcaggcaaagcgtatgcgtgagctggacgaaaagaagctgctcaacggggatgtgatcgacggcattatgatggaggacaaaaaggaggtagacaaagtgattttgacaggtgcggaactgagcaagtatttcggcaaggaaactacgccgagggaaatgaaggaccagattatcaagctgctggacgactggaagggccagcagaaggaacaagaaaagccggagaagaaaaatgaacaggaaaagtaagccgaaacctcgggtcaacgtggcccgaggattgcggggctctgccccgcgccccgaagctctggagatataaatgattccccgtcgccagttattccgtagcatagccgggaaaatcagtcaagggcagcgccgccgcaggcggtgccggaggcacccttgacggatttctcccggttatgctttttcccggtcaagcgacggggatataaattctccagagccgttccccttcccgggggaaggggcggaggggttgggcgatatcttgcttttccctaaaccaaaacagaaatggaggctcaaccaatgaaacgacctttagcgtacctgaccgccgcatggagcggcgagccggatgttgatatggagctggcggcccactactgccgccttgcttatgaggcgggcttttccccaatctgcccgctcttgtatctgccgttgtttttgaatgacagcgttcccgaggaacacaaggccgggattgatatgcgccgggatatgctgcggcgctcccataccctgatcgtctgcggcagcgttgtggacgaggatgtaaaaaacgatattgcggttgccgggcggctgggcattgcggcgacaacgctggaaggggtgcttgccgtgaagggacacggcaccccgggctatgccggacattaagctggggagcctttttgacgggatcggcgtgttccctctggctgcttcccggtgcggtatccgtccggtatgggccagcgagattgaaaaagcgcccatctccataaccaaaaggcactttcccgatatggcgcatttgggagatattacgaaggtggacggcgggaaaatcccacctgtccatataattaccttcggttccccctgtcagaacctttctctgatcggcaaccgctccggccttgctggggcaaaatcaagcctgttctatcaggcgtttcgtatcatacaggaaatgagggatgctactgataacctatatccagctatcgctgtttgggaaaacgtcatgggagcgttttctacaaatgaccggatggactttagagccgtcctatccgccttctcggacaccgaagttccaatgcctccttcgggaagatggggaaacgctggaatggtgcgagggggaacgcctgatgtgtgctggcggctcatggacgcccagtattgggcaggctcccgaaggctggcacgaaggcagcggattttcgtcgtggcggattttggaggcagacgtgccgcagacatactatttaagccccgtccaatgctcccacttcctccgccttgcggagagggcgggcgggccgccgccgaaggagatcgaacagcttcttttgaaacagggcggcagataccagtcatccacccctttcagtgcttccgtatgcggggagcggcaaaaaggcaggaagaaacggccttccgaaacagcttcggattaccaactgacccttttcccactcttttagccagtgatgtaacgccctttgccttctggtatgagggcgacccggagggcggctgtatccgttttctgacggaaacggaaagcgaacggctgatggggctgccggagggctggacaaagtacggggcggacggcgtggagatccggcctctgcaacgttacaaggcgctgggaaatgcgattgccctcccttgcgccgattacattatggccgggatttatgaggtgctggctgaccgggccggaaaggaggaataagcccatgtttgaagcctatataaccaatacagccctgtaccccttaatggggatcgaggtagggacaacggtacatttccccacgacgacacaggagttgcaggccgcccttgccaaaatcgggatagatgggaaacggtacagcgaagtgttctttaccagctttgacagcgatgtgctggggctctacgatcatctctacgaatgtgagaacatcgacgagctgaacgagctgggccacgccctgctggaagtacgggataagggcggactggaaacctttgaagccgctcttgtcttgggaaaccacacacggagcgtgaaggatttgataaacctgacccagaaccttgacctgtaccgcttttacccggatatttctgatgatgaagggctgggccgtctttacgccgacgagcttgggaccatcgacataccggagcacattcagaactacttcgattatgaggcatacgggcgggatgtgcgtatcaacgagggcggcgtattcgctcccggtgggtatgtgtcggcagtcccggagggcttcaaggagtattaccacgggccgcaggacattccgccggaacaccggatatttgcctatcctgaaaaggccgagcctgtccactccattctcgctacactcaaacggtttcaagaagccccacccgctccaaaaaaggacaaggcggggccttcccatgaagaacggtaggacttcgggccagcatggcccgaagcatgaaggaggtgcataccatcaactattaccctatcaatgaaggggccgcccgtcgggcaaaggaaatgaacagcttttccgattacaaggaagggagcgcaacggcggaataccgggcaatggtggacaaggccgccgccatagcggaacagcagaaatcccgggcggaccccatgtaccatgagaagatcgaccatctgttagacacctacgcccgcaagctggccgaaaacatgaaccaaggctttgccattgacgcgagggttccctctgtgctgatcgccgggccttccaatttcccggtgggaaagaaggaaaaacagaaccgggcgcgggacagcaacatggaggaatggcggtatattcaagggctgctggataagatacgcagtaccggcatgggcgggatcagcgccgatgacccggcagcgattgaaaagctccagaagaagctggacgggctggaacgctcccagctcattatgaaggaggtcaacgcctattaccgcaagcatggcaagctggatggctgtgcgctgctgtcgccggaccagatcgaaaagctgaaagcaagcatggcggcaaactggcggagcgacccgaggccctttgaaagctaccagcttaccaacaacaatgcggagatccgccgggtaaagacgcgtatcgaacagctctccaaacaggcgcagcgggagttttccggctgggagttcgacgggggccgtgtggagatgaaccgggaggacaaccgcttgcaggtattctttgatggaaagcctgacgcggacacccgggccgagttgaaaagcagcggtttccgctgggctcccagtgtaggcgcatggcagaggcagctcacggacaacgccatccgggcggctgaccgtctggaatgtatcaagccgctgtccggcgaaaagccctcccagcttcaaaagaagccctctatcttgcagaccatgcgggaacaggacgaaaaagtccagacggagccggaaaagaaagctccgtccggcagagatgccgagcggtaagcctcgggccacattggcccgaggttttctgttccccgagattgtacgggggcctcccggatagcgggaaccccgacggaaaggaggttttatgcaggaagaagtaaaccaaaaaacggttgccctttcgatcaagacaacgaagctcacaggaaaagtgctggctgccgctcttggcaaggtggttcgggcgctgcaaaagcaccaccggaaggcgctgaccccgcagggacgccagagcgtaaaaaagctgatgaaccactatggcggcaaaagtgccatgccctatgtaggagctccaaaggattttgaccggattgcgaaggagttccatgtggactacgctttccataaagtgagccccggtcattacctgctgtttttcaaggctaatcaggcggacgctatcacggcggccttccagaagtacagcgcaaaggtgctgaacaaagagcaggacaaggcttccatcctcggccagcttcggaaattcacggagcagatcaggacacaggcaaaggaaaagcagcgaaccagagaggcggtgaaggacggacgttgagtgacaagatcagaaaatatgtgctcccaaacctgccgtacctctttgtgttctggtttttctccaaaatcgggacggcctaccggatcgcccccggcacagacttcgggacaaagctcatggggatgcttgataccttccccaaagcctttgaaacctactggccggggcagggaggtattgacctgctggtgggccttgccggtgcggctgggatgtatctgctgatacagtcaaagatcaggcaggcgaaaaaattccggcgggatgcggagtacggcaccgcccgctttggaacaaaggaagatataaagccatttgttgaccctaaatttcagaacaatgtcattctgaccgggacggagttccttaccatgaacacccgtccgaagatacccgccaatgcccggaacctaaacgcctgtgtcatcggctcgtccggctcgggcaagacaaggttctggctgaccccgcagcttcttcaagctcattcctcgtatgtggtggtagacccgaagggcggcaccctcgatcagtgcgggcggttcctgcaacgggagaaatacagggtgcgggtgttcaacagtatcgacttttcaaaatccatgcactacaatccgctggcctatgcgcgacacgaggtcgcgtaattaaactgttcggcattgaccgaacctgttattccattagcagtagcctatcgtcaccgaagcggctggcaacggccgtgaggcagcatggcgagaaaaggcagccctcccgaaagggtcaagccgaaaccgcgaggcagaggcgaaaagctggaagcaacgtccggctggggagcttggcttgtgtagtatggtgaatgtaagtaaatcgctgttaaacgtcgttagtgggaaccaggctaaagttgctgataagcctgaaccaaaaggtgtgcagtcggatgttcccctgtaagctgggaacacatggacaaacaggactgccggcggataggcggcacctaacctacacggttgattacgtgaaacgtggtaagcccgcgctttctccgatattcggaaagctgaccgcaaggaaagccgatagaaacgcgggtaaggaacgctggaaaaagcgaatgccgaccttgtaatgaggacggatagggattgaaacagtatcccacgcgaaagcgggctgacttccagcaggtctatctttacgagagaatttacagaacttttgagaggaggaatcgcaaatgaacagaaaactgtgtgcgcctgctgacaaggcacaaagctgggaatccattgattggaaaaaagcggaggcctatgttaaaaagctgcaaatgcgtatcgtaaaggctcaaaaaggcggtcattacaacaaggtgaaatctctgcaatggctgttgacgcactctttctatgccaaggcattggcggtgaagcgtgtgacaagtaataaaggcaaaaataccgctggtgtagaccatgaattatggaaaacgccaaaaggcaaattcgaagcgattgacaaactcaaacgccggggctatcagccccaacctctcagacgggtgtacatcccgaagaaaaacggaaaattacgcccgctgagtattccaacgatgacagaccgcgccatgcagacattatataagtttgcattggaaccattggcagaaactctggcagacccgaactcctacggctttagaattggaagaagcacacacgatgctatcgggcaatgcttcaacgatttgtgcagagccggttcccctcaatggattttggagggagacattaagggttgctttgaccacatcagccataactggctgctggcaaatatcccaatggacaaggaaatgctcgaaaagtggctgaaatgtggctttgtggagaccaaaaagctctttccaacagaggaaggaaccccacagggcggcacaatatcgccagtcttgatgaacatgaccttagacggtctggagcggattctaaaagaaagattccctatgagacggacggtggcaggtaaaactgtttacgaccagattaacttcgtgcgatatgccgacgactttatcgttaccggaaaaagcccggaaactctacgtaacgaggttatcccgctcatcaaggactttctggcggaacgcggcctgcaactctccgaggaaaaaacggtaatcacacatatcagcgacggttttgattttcttggacagaacgttcggaaatacaacggaaaattgctcattaagccgtcaaagaatgcgataaaatccttcctcaaaaaagtgcggactatcgttagggagaacaaaacagccacacaggacttgctcattcgcaagttaaatcctgtcattcgtggttgggtcaactaccatcgctatgtagtttctgcggatatttttggattggttgaccacaggattttcgagtgcctatggaggtgggcttgccgcagacacaagcgaaaaggtaggaaatggattgccaacaaatactggcaccatattgataaccgaacgtggacgtttgcaacagagcctgctttccgcggtaaagatttcgatgaaaaatacctcaagctggaatacgcggcaaatactaaaatcatccgattcaggaaaatcgccgccgaagctaacccattcgatgaaaaatggacgggatattatgaggaacgtgacggagaaagaatgctgaacagtaccaaaggacgggagaaactcgttaaaatctggaacaaccagaaacggtgctgccctgtatgcggagaaagaattacatccgaaacaggattcaagacgcattttagcaccgaaaacaacaggaaatggcccgctattatggtacatccctggtgtcaccgaaatctgcatgaaccaggttacttgatttgagccgggtttcgttttatacgaggccttacgataggcttgagccgtatgacgggaaactgtcacgtacggttcttaggggaggggctggcagtaatgccagtctcttacccgacatcaagacggaaagcgatgttttgaaattcgttactgctctgatcgccaacaccaaaggcgacggcaaggagggcgacgagttctggactaaagctgaaaccctcttgtactgcgcccttgtggcctacatcgtctttgaggggccggaggaagaacgcaacatgaatacgctggtggaaatgataaacagcatggaagtccgggaggatgacgaaaccttcaaaaatgcggtggactatatgtttgacgggttggaacgtcgcagcccccagcacttcgccgtgaggcagtataagaaatacaagctcgccagcggcaagacagccaaaagcatcttgatttcctgcggtgcaagactggctccctttgatattccccagcttcgggagatcatgtcttatgacgaactggagctggataagctgggggatgaaaaatcagcgctgttctttcttatcagcgacacggacaccacctacaactttttggttgccctcgctttttcgcagatgttcaaccttctgtgtgaacgggctgataacacctatggcgggcgtctgccctaccatgtgcgggtgctatgggacgaggctgccaacaccggacaggtgccggggctggaaaaaatcgtggctgtcatccgctcccgtgagatcagcctgacgcttttttatcaggcaatgagccagtgcaaggcattgtacaaagaccattccgaaaccatcatgggaaacatggacagtatcgtgttcctcggaggccgggaggcttccaccctaaaggatatttcggaaaactggctgggcaaggccaccatctctatgcagaccgagggccgaagccgtggacagtctgaaagttacagccagaatatgcagcggcttggccgggagctgatgaccaccagcgagatcaccaccatgcccggagataaatgtatcttgcagcttcgggggctcccgcctttcctgtccccgaagtatgacttgaaaaagcacccgaattacaagtacacagccgaatttgataaaaagaaaaacgccttccgcttggaaagcctgttccgccaccggccattgagactaaagccggaggacgaatacacggtgtacgaagtggacggctccgacacggacgaagaagctgacctgttgaatttcgatgatctggacagcgacgagtttgtgtaacttcgggccatgatgacccgaagcgccgccgatgtgggcggctttttttgtacccaaaaccatcaaacaaacaaaatggaggaacgtatatggaatttttcaatcaggcaatcgacattctcaaaattctggtcatggctcttggcgccggtctggcggtatggggcgtcatcaaccttctggaaggttacgggtcggacaaccctgcggcaaaaagccagggcattaagcagctcatggcgggcggcggtgtcgttctgatcggccttcagcttatccctctgctgtccgggctgttcagctaaatgtcacccgttgtcccttttccagaaaaggagctgatatatggactttatcatcgacgcaatcgttgaatggctgaaaggtctgctcgtcgatggtatcatggggaatctggacggccttttcgataacgtcaatcagagcgttggcgaaatcgccacacaggtaggcacgaccccggcggactggaacgccggggtcttttccatgatacgacagatctccgaaactgccattctgccaatcgccggggtcatcctcacttttgttatgacctatgaactgatacagatgctcatagaacgcaacaacctccatgaagttgacacatggatgttttttaagtgggtgttcaaaacctttgtggctgtgatgatcctgacgaataccttcaatatcgtgctggcagtctttgatatgagccagcatgtgatccagcagtcagcgggcattatccagaacgggacagagatcacgccggatgtgctggacagtctgcggacagagcttgaggcgatggagttaggtcctctgttcggactctggctacaatccttcctaatccagcttaccatgattgccttaaacatcgtgatcttcgtcatcgtatatggccgtatgattgaaatttatttactcacaagtttagctcctatcccgtttgccacagtccccaacagggaaaccggacacatggggcagaactatttccgctccctctttgcggtgggctttcaaggtctattgatcttagtctgtgtcgccatctatgcggtgctgatccagagtatcgccaccgacggcgaccccatcggggcgatctggggctgtgtgggatatacggtgctgctgtgttttaccttattcaaaacaggcagtcttgcaaaatccatcttcggctgccattaagagacttcgggccatgctgacccgaagcggaaaggagaaatccatgcaggaaaaaactgcgggcggaacaccagccgcccctataaagctggatgtaagcgtgcgggtcatcgaacctgtgaaaaacctcatgggctttgccagcgtgaaattcaatgactgctttgtggtggaaaatctgaaaatcgtacagggcagcaaggggctctttcttgggatgcccagccagccagacggcaaaggcggctaccgggatatggcctaccctgtcacaaaggagttccgggaacagctcaacaccgctgttctgcaagcctatgaggcaaagctggaacagatggcggagcgcggctctgtggggcgtgcgtccatcagcgaccagctcaaagccggaaaagcggctgccgaacaggcaaaggcggaacggcccccgaaggaaaagcccagctgtggcgcggagcgttgacctcgggccatgctggcccgaagcggaaaggaggcgaaacccatgccacgcaaacggacgagctatgatgcggcctgctactatgacggcaagctgctgggccgctgtaccaaagcggacagcgacgcctataccctgttgatgaacgcctgcggcggggacgccgcccgtgtcctgcgggaatacgcctacttttccccggagctgaaggccatcttggaaaaggcggcgctcatgcaggcggaccggaaccggacgggcggaatgttccatgcgccgaaaagctccccgtggggcgaggtgcagagctgtgaaaccctctgtccgggggtgtttctggtatctaccgccagccacggcggaacgatggtggcaaacgaggtagccgccgtcctctccccagcggccaaaaaatgcggcttcaaggacaagggctatatttgctatgaggaggacgcacaggaaagcgtagtgctccgggagctgctggacaaaaagctgtggaaaatccctgaccgcattaaggacaaaggacagtttgaagaaaaactcaatcagtccatccggcagtatcaccccgaatactggcgggcaaggcagagcggacgagaggccgccgaagctgcccgcagcacagccccggccaaagaggccgcaagataacctcgggccatgctggcccgaagcaataaaggaggtgtaccaaaatggcctatgtgccagtaccaaaagacctttccaaaatcaagacaaagctggccttcaacctaacgaagcgccagcttgtttgtttttccagcgcggcggcggtgggcctcccggcttacctgttttcccgtggcagtatcgggaacagtgccgccatgttcctgatgatcggcctcatgctcccgttcttctttctggctatgtatgaacgagacggtctgccgctggaaaaagtgctgaaaaacatcatccgcacccggttcctctatccccgtgtgcggccttacaaaaccgaaaacttctatgcgctgcttagcgccagaaaggaggcgcagccgattgcgaaacagcagaagggccggaaagcccgcaggcagaaagcctgaaaaacagggccttaccggcctgttcacgaaaggaaagaacattcccaccaccgcccagcagaccctcccttaccgggaaatgtaccgggacggggtgtgccgggtagcggaccgctattacaccaaaaccattgaatacgaggacatcaactaccagctcgcacagtccgaagatcaggcggccatctttgacgggtggagcgcctgcctcaactactttgacagcagccttccgttccagctttccttcctcaaccaccggagccgcccgggcagccggtacagcgtgaacatccccatgcaggacgatgattacaacagcgtccggtgtgagtatgtggaaatgctggaaaaccagatcgccaaaagcaacaacggcattgtccgcacaaagctcctgaccttcggcgtgaacgtggacgaccttcccaccgccagggcaaggctggaacgtgtagaggcggacatttgcgggaacttcaaaaagctgggcgtcaagtgccgctccctttcggggctggaacggctggaacttcttcacggacagctccaccccggcagcggctcccccttccggttttcatgggatatgatccccaaaaccgggctttccaccaaagactttatcgccccggacagtttcgattttcgtttcagccgactgttccgggtggggacgacttggggcgccgcctcctacttgcagattttggcctcggagctctcggacaagctgctggcggagcttttggaaatggatgcggaaatgaccatcactctccatatccaaaccgtcgatcaggccgccgccgtaaaatctatcaaggccaaagtctccgacattgacaagatgaaggtggaggaacaaaagaaggcagcccggtcagggtacgacatggacatacttccacccgaccttgtaacgtacagcaacgacgcaaagaccctcttggaagatttacagagccggaatgagcgaatgttccttctgaccttccttgtggtaaacatggccccgacccgccgggagctggacaatgacctgttcacggtgtcgggtatcgtccagaaatacaactgcaccttgaagcggctggacttccagcaggaggatggttttctttccagccttccgctgggccataacggcattgagatcaagcgcggcatgacgaccagctccacggccattttcgttccctttatgacgcaggagctccgcatggatggcgaagccgtctattacgggctcaacgcactttcccataacgtcatcatggcaaaccggaaaaagctcaaaaaccccaacggcctgttcctcggcgtgccgggctccggcaaatcctttgccgcaaagcgggagcttgtgaacgtgttccttgccacccgtgaccggatcattgtggtagacccgatgggcgaatactcgccccttatcaagcggctgggcggacaggtcatcgagatcgccccggacagcccccaccacatcaatccgatggacattgacctaagctttgacgaggaaaacccgatggcgctgaaagccgactttatcctgtcgctgatggagctgatcgttggcggcaaggatggcttgcagccggtggagcggaccgtcattgaccgctgtgtacgccagatgtaccgggaacatttgcaggacccggaaacaagcaaaatgccgaccctccaaaccctgtatgacctgctctgttcccagccggagggcgaggcggtacggctggcaactgcccttgaaatctatgtgtcgggttcccttaacgtgttcaaccatgaaaccaatgtggacttaaaccgccgtctggtatgccttgacttaaaaaagctgggggccgggcttcggacgattgccatgctcattatgcaggacttggtaaactcgcaggtgtccatgaatttcctccgcggtatcgctacatggtgctacttcgacgaatttcatgtgctgctccgtgaccgtctgacggcaagctattgtgtggcgatctggaaaatgctgcgaaaaaaggggtgcgttcccagtgctttaacgcagaacgtgaaggattttctggcaagcccggagatcgagaacatctttgaaaactcagacttccttgtgcttctctcgcaggcacagggggaccggcagattttagccaaacagcttgggatcagcccccatcagctttcctatgtgacccataccaattccggcgaagggctgctgttcttcggaaacaccaccatcccgtttgttgaccgcttcccgcagaataccgagctgtacgccattatgaccacccgcccggaggacaaaaaacaggaaatgaaccgggcataacacacttcgggccatgctggcccgaggtttggaaaggagggatacatcatcggaaagaaaccggataaacggaattttcaaaggccggagccgacggaggagaccgggagcaatcgccccggaccggctgaacgggaagggccttcccccgcactgtcccgacgcctgcggtttgaggacgaggataccgggcaggacagtccttcgggccacgatggcccgaagtccaaaagcggcaagtttcaagaggacagccggaaaagccgtccctctgaccgcatgaggcaggaggatgaagcgggcgggccgcaggataccggcaaggcacaggagccggagggctccgccgagaaggccgggagcaaaaaggataagtaccagaaagcacaggcaaaagcggaacacgccggggaaaagctgggaaaggctcgggagaaactggacaagaccgaggcaaaacgggcagcgaagaagccgccggggcttgcaaaaaaagctgtccggggagcccgtacagaagcatggttctatgtccacaacaagatccacgaagttgagcatgaaaatgtgggtgtggaaggagcccataagtcggaacttgtggccgaggccggagcccggaaactgacccggtatgccaaacgccgctggcaggagcacccggcccggaaggtggcaaagtgggaacggaaggacataaaagcccgggccaatgtggattttcagaagatggcctccgagcacccggagcttgccagcaatccgctttcccgtgtgcagcagaaatggaaactgaaacgccggtattccaaagaagcaaaggcggctgcaaaacagggcgcaaaggccgcaaagaaaaccgctgccgcttcgggaactgcgacccggcgggcggcgcagtttgtgacccgtcatcccgtggcggtgctggtcctgctcctgctgttgctgctctgttttcttgtgtcggcggtaagttccattttccccacgcttggcagcggccttgccaatgcgttatccggcacctcctacgcctcggaggatacggacctgctgggggtggacgaggactatacagcgttggaaaacgagctggcgcagacggtggcgaacattgaaagcacccatcccggctatgacgagtaccgctattccgtggacgagatcggccataacccctatgagctggcatcctatttctctgcaaagtaccatgtctatttccgggaacaggtgcaggacgaactgcgggagattttcgaggcacagtatgaactgaccttgacggaggaagttgagatacgctaccgcaccgaaaccagcactgacccggagaccggggaaaccaccaccgagaaagtcccctatgagtattacatcttaaatgtgaccctcacaaacaaaacgctgcctgccgtgatcctgccgaggcttaacgaacagcagcgggaaatctacaccgttatgcagcagctcaaaggcaacaagccctatctgtgggaagggatttacaacggcggcgaagataccggccccagctatgagatacccggcgaggcgctggatgacccggcttttgcggcgctcatggaagaagccacaaagtacatcggctggccctatgtgtggggcggctccagcccgtccacctcctttgactgttcgggctttgtctgctgggtgtacacggccagcggcgtccacaacctgccacgtaccacggcgcagggcatttataaccagtgcgctatcatttccccctccgaggcaaagcccggcgacattatctttttcacgggaacctatgacagccccggccctgtatcccatgtggggatttatgtgggcgacgggatgatgctccattgtggttcgcccatccaatacgcaaacatcaattcaagctactggcagacacatttctatgccttcgggcgtttgtgagccagaggaaaggagtccttgcatgaacaagatcgacaagctcgataaggaactggaaaaagcccgggagaaggcagccgagtggcaggccaaaatccgggagctggaaaagcagaaacaggaggaagaaaacagccagatcgtgcaggcggtgcgctccctcaaactgacgcccgcccagcttatggcttttctgaacgaccccaaaaacagccttaccgcttcgggccatactgacccgaagccggaggcacccgaaaaggaggacacagcccatgaagaaaactaaataccgcaggctggcggcgatggctgccagccttttgtgttgcctgatctttacggtcccggcctatgcacagagcagcgagccgcagccggagacagcttccgctccggcagaaaccgaagcagagccggaaacccagaacccctttaccccggacgggacgggaaccgtggtggacaacgccaccgacgaggatggaaaggagttctacaccatcaccaccgcagacgaaagcgtgttttatctggtgatcgacaaacagaaaaccagcgagaacgtctatttcctcaataccgttaccacagacgaccttctgcctcttgccgaacagggtaaggaaccgcccaaagaagtgaccccggagccagagccaaagcccaccgaaccggtggaggaagtaccggaacccgagccggagaaaaaggacagcccccttctctctctgctcctgatcggtgcggtggtgctggccggtggtggaattggttactatttcaaaatttacaagccgaagcatgaggccccggatttggaagatgattactgcgaatatgaggacggggagctggaggaaatcgcagaggaacccgaggacgaagataccccgccgtgggaggaagatacggaggaatgagaatgaattttacaagcagcccttttgaacgaatgatgaaggaagtaccgcaccccggctgggacaatgacgacccttgtaagggatgccgttactacaaggagtgcaaaggaaagaaaaaacagtgccggaagaagttccgggcgctgatcgtggagtcccgcccttcgggccatcgtggcccgaagtcataaatggacgcccgggagctgacccgtgacgagaagaagaaaatccgcactctggtcacggggatgtgcgccaactatgaccgggaaagcggcctgtgccttcctcttgactgtgcctgctatatgctgcacaagtgctggacaggggcgtactgccgttatttccgtgaggctgtcctacctcttaacccggagcttcaagcgtcgctgacaacggaaggcatctccccggagctgcgggcctgtgcggtctgcggaaaggcatttttgcccgaggggcgtcaagcctactgctccgacgcctgcaaggccgaagggaaccgccggaaaagccgggaacgcatgaggaaaatgcgggagaaaaggccgggcggctgttacgatttgccgcctccaaaggcttgacattccgggcttttttgagggtgtttccggggtgggaatatcttattacattcctccccggtctgccctcttatttcgtaacatccagcacttcgggtcatgttggcccgaggcacagaaaggagggatctcttggagacagtacaaggatatgtgattttgaaagctgccacctttgaaaccggacacggctttgcgctggggcataatccgggagcaccgagcccctttgtgacctggcagtttaccgagggggaaaacggccatcgggattactactggggccgctatggaaccagtcaggcgtgggcgcagagggactttgaccgccgggtggacgactatcagcagctttaccatgcggcggtcaagcataccgagctgggaccggagggcgtttaccgctattattccacccagcgccccgtggacataggaacttacccgaagccgccggataaccagcctctttccattgtcaactacgacgatgacaggcggcgtcctgtggcagacggcaggctgatggcatggggcgaactgacctacgcaaagccgctgaccgaaaatcagatggaggattatgaactgaaaccagcaccgggcaatcctgaccgggtgcgcccatccattaccgcccggctcaaagaaggaaccagagggcaggaacccccgaaggagcccggccagaagcggagccatcaaaaccatgaggaacgataaaggaggatcgccatgcacgaaaaagacaactatctgaaaaccgccgagctctccacggagcagaactgcaacatgatcgacggcgtacccaacaatacgcccatcccacccacgcccccggagctggacgcaaagccgctggacaaggtaaaggagcccaaagagcgccggaaaggccgggagctggaacgctgatggagaaccgcaagcggaatgtccatctgcacgtcatggtaacgccggacgagctggcagccatccatgaacggatggctgaggtgggcatttccaacgccggggcttatgtacggaaaatggctctgaatgggtatatcctgcacatcgaccttgcgcccgtaaaagagctgatctctctgcaacggcgctgttctaacaatctcaatcaggttgccatacacgcacacacctatggcgtgtacccggaggaaatcgacggattgaagcgggactatgaaaagctgtggggcgaggtgtcaaaggtgttgcgggagctctccgagctggtggcaaagtaagacgagggcggcaggcttccgttgcagggcttgccgccctgctctttttttaccacttcgggccagtatgacccgaaggtttgggacaggatttactaatctttcgcaacatttatgtccccgggcaggcatgataaaatagaggtagaaaggatagataaaggaggttttgaagatgaagatactgctgaaaatattggttgctccctttgctttggcgctgtcccttctggcggctctgctggtgtttctgtttgagatttgtgccgtcctgctgacgattgcctctgtgatcctggcggtgctgggtgtcgctctttttttcacgccgacgcccataggcgggattgtatttctgtttcttgccttccttctttcgccgtatggactgcaagcggcggcgggctcccttctttgggcgctggacggaggcaaatccgctctgtaccggtttctggcaagttaagcagcctcgggccatactgacccgaagtcggggcggtctgaatgggccgcccctttctcatggaaaggaggaatgatttttggctaccacaactttgttacagcgccatgcgggcgaaggcgaaacgattgctgaggctatccgggattgtctggactatggcaaggacccggagaaaacagaaagcggaaagtatatctccgcttatgaatgtgatccggccaccgtggcggacgagttccttttggcaaaggccagctatgccgctatgacgggccaggaacagaagaaagaaaataatgtgctgtgctatcagatacgacaatccttctatccgggcgagatcaccccgaaggaggcgaaccgtatcggctatgagctggctatgcgctggacaaaggggcggcacgcttttatcgttaccacgcacaccgataagcagcacatccattgtcacatttattacaactccaccacccttgactgcacccggaaattccgaaatttttggggctccagcttcgcccttcggcggctctctgacaggctgtgccttgaaaacgggctatccatcgtggagaacccgaagccccggagcaagggcaagtatcggaactatggagagtggcagaaagaccggaaagggccgctttcctatcaggacaggctgcgccttgccattgatactgcgttggcggaacgccccgctgatttggacgaatttctcaatttgatgaagcgggccgggtatgaggtcaagacggttcggggcggcggtatcagcttccggctgaccgggcagggacaggaacgcttcacccgtctgcgtgcctccacgctgggggacggctacgacttgcaagatgttctgtccgctattgagggcaaagaaaaacgccccgggcactcggagcggaaaatcagtctggcggtggatattcaagcaaagctggctgccggtaaggggccgggatatgaacgctgggcgaaggtatttaacattaagcagatggccgccgctcttgcctatatacaggacaataacctgaccgattatgagcagttggcgaagaaagctaccgaggcggcagaccgtttccatgttatttccgaacaggtcaagcagacggaacaggccatgaaaaccaatgccgggctaaaggccgcaacggttcagtatgccaaaacccgcccagtctttgagcagtataaggcgacgaagtacagtcggaaattccttgcggagcatgaggccggccttgaactgtaccgggctgcacaagcggaaatgcgctctctgctgggcggggcgaagctccctaaaatggatgtgctgaaggaggaagaccgcaagctcacagcaaagaaaaaacagctctatggagaataccagaaggcacgacgggatatgcaggagatcgtcacgatcaaggcgaacattgacactctgatgggctacaccgagccgggaagaaagcaggaaaaggagcgttaaggttatgaaaataaggagcaaagcgacgctgacacttcgggccatgttggcccgaagatacgggtttggggcgagccccaacaagccgcctttgtgccacttgtggccacagaggcattgcttgccacttagcggcagtccctaaaatggcgcaaaaaaaaacagaggcccttattgatatgtaccccctttactggacacccagtagagggggtattattatgcggtacacatatgagtacaaaaggaaatgtgtagaactgtatcgagaaggaaaatggccagaaacgccggaaggtgttagcaataaatcctttcgggataaagtgagactatgggtaagagcagaggatagccgcggtccagaagcactgaaacacaaaaatttcaacaggaactggacaccagaagaacggctggaactagtatcccaagtaatgtccggaaaatcctgtgtgtcagtggcaatcgaggccggtattcaagatagattattgtatcaatgggttcaaaactataaaacaaaggggtataatggcctggtagaaatgaaaaaaggtcgtccaagtaaaggggtaccccaaatgaaaaaggaagaagcaaggccactgaatgaatctgaacgagaagaattgatccggcttcgggcagaaaacgagtatataaaggcggagaatgaagttataaaaaaagagatcgccttgagagaagagaggcacgcagcgcaactcaaggcgagaaagcagcgatcatcaaagagctgcgtgaaaaaggataccaattgaaatatctgttgaaatctatgcagatggcacggtctacctattattttgagttgagcaaggccgatcaagttgccgttcgaaaccattgcttggcagatgaaatcaaagacattttctcacagcataaaggccgctacggtgtgcgaagagtatatcaggaactgataaagcgcggccacaaggtcaatcataagcggatacaacggcttatgcacactatggggttggcaggaaagcgtccaaaggaaaagtaccattcctacaagggcgaggtcggcaaggttgctgagaatatccttgaccgggatttcagcacgacagctcctatgcaaaaatggactaccgatgtatctcagttcggtttttcgtgggggaagtgttatctctctcccatactcgacatgaacacaaacgaaatcatttcttatgatttatctcaaagtgccaatatggaacagatccagagaatgttggccggcgcctttacaaagtttccctctgtagatggcctgatctttcactctgatcaagggtggcagtaccagcatgtgtacttcaggcaggcacttaaagatcacaaaatcattcaatccatgtcaaggaagggcaactgttacgacaattgcatcatggagactttctttggacggatgaaaaatgagatgttctacgggcatgaaaaagagtattcctcttttgaaacatttgccaaggctgttgacagctacataaattactacaacaacgaaagaatccaagagaaaacaaaatggatgcctcctacaaaattcagagaggcatccatgtgcacctaattcaatttttcatgtgtccagaattctgggtacatatcatattctggaacctccgtttctctggctttcttaatgccctcggctgtggcttctattacaacaagctctttttcattcatagaatttaggagcacatcaatgtgctttctgcaagaacttgaccttgcccctccgtccgcatgaataaactggtcaactgaaacgtcaaacatggtaatgagtttaacaaaaaggtcgaagctgggatactgacctttgttctcaatattcataatggtacgggagtcacggtctactaattccgcaacgtaggcttgtgtccagcccttttcttctctggctcttttgagagctgccccgaggccgtgaaagtcaaaccttctttcatcttggttcattctcatatcaccctatatcattgtacatttctggttggattatgagaatgtaatgaaactttatgtaaggtagtatttcatttcactattcacttgtaaaatcttgatgtaaaagccaacaggctatataatttatgaagaaataattttttcaaaaattcgtccgctgtaacatttcacggacatttgcctgttatactatctgcaaaaagcaaaggaagtgaggatatgaagcagattttaattgtcgaggacgacagttttttgaataagatgttggcctataacctgaccgcagacggctacggcgtgaccgccgccctaaatgccagaaccgcagccgacgccatccgccagcggaaatttgatttagtgctgctggacattaacctgccagatgggaacggttttgagctgtgcaagctgataaagccccagcacccggacactatcgtaattttcctgaccgccaacgatcaggagagcgaccatatacggggctatgaggtgggcgcggtggactacatcacaaagccctttgtgatcagggccttgcagcgaaaaatcaaagccatgttcgccatgctggaacaccacaaaccggccaaggatatttacgacgacgggcggctgtttctggacttttcggagcagacggcttccttaaacggcaagcccctgaccctatccccgatggagtacaaaatgctgaacctgttccgtaaaaatccccggcaagtgctgacccgtgggcagcttttggaaaagctgtgggatatagacgagaggtttgtagacgaacacaccctgacaacctccatcagccggattcgcagcaagattgaatccgacggcggcgcgccctacattaagaccgtttacggcatgggctatcaatggacgggaggcgaggcaaaatgaagtttcaaaacctctcgataaagcggctgtttggccgggtggcaatggggcttgtcctctccatgtccgggatcaccatagccctgtttcttgtgacaaaacagacggcggtgctgctgacgggcggggcgctgctgctgtgcgcccttgtgggaatttttgtactgacgcaggcgtttggaaagcggctgtcgcagtttaccgctgacctgtgccagaccttagaccacatgatcgccgggaatgaagcgccccagcggccagaggacagcgaaacccagcttgccagaatcggacaccggctggcaaggctttaccagatcatgcaggagaaccgccgccgggtggacgaggaacggcaggagttacagacccttgtatcggatatttcccatcaggtgaaaacgccggtaagcaatctgaaaatggcgacggacaccctgctggaaaagcccatgaccgaggcggagcgcatcgactttatccggggaatccgcagccagacggataagctggactttctctttcaggcccttgtgaaaacctcacggctggaaacgggcgtgatccagttggataagaaaccgggtcgcctctttgataccgtggcgcaggccatgagtgggattgtgtatgcagcggagaaaaaggaaatcgctgtgtccgtggactgcccggaggatttgaccgttttccatgacagcaagtggacatccgaagccctctttaacctgctggacaatgcagtgaagtacaccccggcaggcgggaaaatcgccgtgtcagtggtgctgtgggaaatgtatgtggaggtcaaagtgaccgacaccggcaagggcatttccgaaagcaatcaggctgccatcttccggcgcttctatcgtgaggaagaagtacacgaacagcagggcgtgggcattggcctgtatctggcccgcgagatcgtaacgcggcaaggcggctatatcaaagtggtttcggagccgggcaagggttcagaattttccattatgctgccgacaaaataaaacgcggcggacggccatttccggctgcccgccgtaaatttttttgaaatgtccgagcgttgtaacatttcacctcgattttcaatgaaattttttggccgctgtaacatttcgcggacatttaggttttacaatacccttatcaaatatggaggtgatacaactatgacatggccttttgaaaatgacaccagcgccattacaaagaagctggcgcaaagaagcttcaaagccaacaaattacgaaatattgttgctgtaatagcaatcgttttaacatcaatgctttttacttctgtaacgactttatgtgttggagcgatccagtctatacagacaactattttgcaaattaggggaaccagcccatccactggtacatctgtaaattggattgccataatagcagccctgttttttattatgatttttgtaataacgggctatttgctcattcgcaatatttttgagatttctgttgttcaagaaataaagaaatatggcttattaagaacaatcggaacaacggagaagcaaatcaagcgaattgtttataagcaagcattttggctgtctataattggtatatctattgggttgattttaggatatatagtaggaatacttatgcttccgtggattcttaattttatgaaaggcgagtatcacaatctttctgtgaacttgagttttaatcctattatttttgtcgttgccgggatatttagtgcgattactgtttgggtgagcataaagaaaccattcaaaattgcagctacgatttcgcccattgaggcaaccagatactatgaaaaagacaattatcatagtgccaacaagaatcgtctttcgtttaagaatagaataatagaaatggcatggagaaatttaagaagaaattcaaagcgtaccatatttatcgtcttatccatgatactctgcattattctcctaaacagtgcaatcgcaatcggaaatagtgttgatgttaaaaaatatgtatcttctgttacctcatttgattttgttgtggcaagcccaaacacattttctaatgtgcaaggttttcgatttaaagatgattctgttagtaatgaaatcatatctgatattgaaaataatattcctgtgctgaacggaagtcgaatttataaaaacactttggatgatgtcagtgttacttatgattatggtagtttggtcacggaagtattagacgaatacacagaagataatcaccttatacgaagtggtatggttgatggcagaacttatccagtaaaactcggtgttgattatcgacctctttgcaatatttacggggtagaaaaatcaatacttcctaaattgaatttcattgagggagaaacagatatacagcaactaacctcatatttggaaagtggaaactatgttatagaaatttcagcgatcaacccaaatgaatctcctgaatttctttgtccgctcaatcaggaagttaccatttacaaagatggattgccttataaaacggtttcggtaattgcgcgtgcagtggttgatttttcattggtagaatctccgggtaagaatgttggctacactgatgttggcggcgattgtcctattttctatatgagtaatgagatgtttgtggaattgtataacaatccagccataatgagttatgtgtttgatgtggaaaaagaacactttttgccagcgaccgagtacatcaattctttgcctaccgttgaatacgcatcgtctgaaacattggcacaaactatgaatggattaaaacaaactatttttatcataggtggccttattgggtttctattaggaagtatcgggcttgtgaatttttccaacatcattataacgggcattataaaccggcaacgggaatttgctacattagagagcatcggaatgacgaaaaaacaaattaacaaattgaccgtattggagggattgttttacgcatttctgatttgtgtaatgggtttacctctctctcttattgttgcaaatacaattcttcctactttctttaatcaacctgacttatggctgtttacaatacagcctacgattttcccgttgatattagagggaattgttatttgcgttgtggcgattatagttcctcatgtttcgtttcgctattttagaaaaacaagtattgtagctcgattaagggtagttgaataataattttgaaatgtccgagcgttgtaacatttcaccccgattttcgatgaaattttttggccgctgtaacatttcgcagacatttgggttttacaatgaccttatcaacaaaagtgaggaggcgttgcaatggaactgaccccgaccatgattttgaatctggcgctgctgatcgtcccgcccgttgcccttgtgctggcgttctggcaaaggctggcccagcacatccgctggacggttgccttgactgccctctgcgatgttctcctgttttgggatgaactgttctactatgagagcttcggactgttcgctgtgctgattctggtacagttggcggccaccggcgcagcagcgttccgcatttacaacaaacaaagaaaggattgaattttatgagaattttacagactatcgacctgaaaaagtattacggtacagagccgaatatcacccgcgcccttgacggcgtgaacttctctgtaaatgacggcgaatttgtggccgttgtgggaacctccggcagcggcaagtccaccctgcttcacatgatgggcgggctggacacccctacttccggcaatgtgattgtccgggacaaagaactgtcgaaaatgaacgacgaacagcttaccatcttccgccgccgcaacatcggctttatcttccagaactataaccttgttcctatcctgaatgtgtatgagaacatcgtcctgccggtggagctggacggggacacggtggatcagaagtttttggacgagatcgttcacctgctggggctggaagataaactgaaaaatatgccgaacaatctttccggcggccagcagcagcgtgtggctatcgcccgcgccttgattaccaaaccggctattgttctggccgacgagccaaccggcaaccttgatagcaagaccagtgccgaggtgctggggcttatcaagcgcaccagtgcagagttccggcaaactgttgtgatgattacccacaacaacgacattgcccgccttgcagatcggattgtccgcattgaggacggcaagattgtggagtaaggaggtggcaggctatgacatggccttttgagaatgataccagcgccattacaaagaagctggcaaagaaaagtttgcaaagcgagaagcgccggaatctgatggtggtgattgtcgttgcactggcggcgtttctaatctgctttacgggaattgtgtctacctccctgacacaaatgcagcgcaatcaggttgtcgatacttatgaggcggtctggctgggcgtggaggaaaacgacattgaaaccctgaaaggactgccggagtttgagcgtgtaggcggctactatatgctcggtgaggaactttcagaacagggctatcatgcgtcctatgtgtattgtgacacacaaatgatggagattaccaaggcgcagatggagttattagagggccgggttcctgaaaaagcaaatgaaattgtcgtaagcaaatactttctttccacctatggaaacaatgccaagatcggggacactgtgaccttagacaccgagagttttcatggtgattatgtcgttaccggcattatgaacagtgtaaatgaaaaggaagcgaatacctgcgcgatcattctttccaaagctgccctaacagaatggaatgagtttgacccggctggctatcgcgcctatgcccatttcaaaaacagcgatcagttgggtgaggaactgatgacctcttattgcagggagattgcagaggaatatcagcttcctatgcccaaaatgaacagtaagtattttgcctatgcttctaaatcctttgattttgcactgatggcaggtgtgattgcccttgttctgattggcggctatattgtgatccagagtatcttccgtatctccatcaatgacaaaatccaaagctacgggcagcttcggacgattggtgcgacaccaaagcaaatcaagcggattgtaaagaacgagggacgcaaactcggcagtatcgggattctgattggcacagtgctgggcgtatgcggcggtttcctcctgttttccaagggttttaacgctgtttcctatgtggcaacggttattttaacgcttataagcagttggatcatggtatctgtttccatccgtaagccggtgaaaattgcggcagggatttcccccattgaagccgtccattttaccccggcgcaaaaggacatccgcagccggaaaaagaatatcaagctcaatcctgtttcaatgggaattgcaaattttaggcgtgaccgaaaaaagaccgttgctattgtagcctcattgagtttgggcggaattatcctgcttgtggtatcctccattgttttgctgcgctcaccagaggcgcttgcaagacagtttttcccagacggcgactataaaatttatttggattctgaaatgacagaagaaaaggttatggcagcgggaaatccattgaatgaggaattaaagcaggaaatcttatctattgatggcgttacagatataattccaagcaggcaatctctccatgcaacttataaaacagagattcatcaagctggtggtatgtgcgatatgctgaccgaccagaattatgcggtagttgaagcggctctgacagagggaaccatgccaacagattcccgtagtattgtaattgactataatgtgctaaagcagaatgaggatatgggtgttggttcaacggttgagatttctttgggagaagaacagccatccgtttctgttaccatatcggggttatacgctcctgcaaaggtatattcaggacatggcaggatgcacttagatggggcaactctttttgcaccagaagcgttgttccacgaactgcacccggaaatcacctcttttgactattcatggagcattgtaaatgaccctaaaaaaacggactatgtaggagctgaattgaaaaatattgttgccagccatagtaatattgccttagatgaaatcaatacagtgattgaatatgaagaaatgacaaattcttttgcgtttggcagtatggaggtactgtcatggctggtatttctctttggcgttatcaacctgattaacacgacactctctaaccagatcgcccgaaagcaggaaaacagtattctgcgttctatcggcctaacacaaaaacagctatgtaaaatgaacatctgtgaggggctgtgctatgcgctctttgcaacattggcaacgctgatcgttgggcttccggcttccatctttgcttgcagaaaaatgagtgtaggtgcttttgccggaaatgtagtgccttatcaattcccggttttggaaatggggctgttcattctggtattgttcggaatggagctaatcttgtctgtatggacaatccgcagacagaaaaaacaatctctgattgaacaaatgcgggcaatggaataaccgtatgggatcggcggggcggcgtgtgctgccccgcttttttcgtcatttctcaaagaaatttttgaaatgtccgagctttgtaacaattcagcctgtttttctgtcgaaatcaaagacgcctcggacatttgtgtaacatttgtagtttatgcttgtggtaaatcaattaagaaacatctgcccccacagcggggaaaagaaaaaaaccgctgacgggcagaggatttcgtgtgctttcctatatcactgacgatacggcggttttgagaaatcagagccgccgtttcttttcgccccccccctaaaccaacgacgacctaacaccgtgtaaatccacggcggcatataggaggattgccgccgtgtctatctttgccttttttcacagtgcccatgacctacatcagttaaaaaaagcatagccccgcctccgggttattccggctatgtatgcgaaatttgttggaaccttaactattatgtcatttcatgcgtccgtgtggcttcatgccgcccgggcgcttttgcgttcttatggggcggcttcgggtcatgttggcccgaagccattccccggtgccgctccccgccgccttcgtttcggtcactcgtcaaccaacaaccgaaacggaggtcaatatggctattatcaatttgcgggactattacccattttatacatcggattgcttcatggaagtatcggaagaagttgcagaaatgttcaaagagtttgagcgtaaagaggctgcttatcggctgcgtacataccgccacaaagcctactattcccttgatcgggacgacgggctggagcacgaagctgtctttgtcgccttatcgccccatgaactgtatgagcggaaagtgaccatgcaggagcttcacgcagcgatttccagtttgccggacaaacaggcaaaacggatttatgctcatttcattctcggcatgaccaaacaggacattgcccgggcagagggcgtccatgaaaaagtggttcgtgtcgcaatcgagcgaggtctgcggcgcttagaaaaaattttgaaaaattctttgtaaggcgtaccgatttaggccggaaaatgaaatggcttatgagaggcaaaacacttcgggtcacaatggcccgaggttcagacaagcctcatgcagattgaaaattgaataaaaagacacccggatacgaaggggaacgcgctgtgtgacagacccgccatgacctcggatttcagagaatacagtctttgtaaaactgagcgagcgaacaggtccatgccataggtggggcaaggctggctccaccggaacaggcgcagaacccggatacttgcgtttagtcacagtccgagcgttgaagcggccttgcaagccgtgagccgtcgcaggcaatgagaacgccttgccatcagaatggggagagttgaaatactatggggcatgaagcctatgcccgtccggtgtgtctgaaatgaagtgaaaacctatggggagcccccggcaatgctgtctgatgataggccaaccaatccggcgtggctccccatcttttcaaaaaaggagcactttatgggaaatgcgtttggaatgatccccggcttggaaccggacgaatggagcaatgacgcctgccgtggttatgtcattatggcaatggaggactgcggattttcaaagaaggatatacggcgtgttgtggggcagctttatgaagtattcgacctcaacagcgtggaggacgccaaagaaaagtacctttccagtccttactgacctcgggccacattgacccgaagtggagaaagctcaaagggcggcacctgctgggtgccgtcttttgacatttccccacgggacaagtgggaaaggcaggcatatacacgcactttcgcaaaggaggttttcaatgacgcaagctgtcacttatgaacgagaaacaaagtctgtcgcatttcaagggaagatcattgtgctggaaagcctcacgccggtacttcccccgaaggagaaagcacagcgcaaaaaagaaattgagcgttgtctttatgaggtgttcagaaaatatggggacagatttccctaatcattcgcaacattgttgtccggggctgctgatggtataatatagttgtaaggttggtagctccattccaacaaggaaaggagcccaatatggaatttatcagagaagattgtatttacgcaagacagtcagtagaccgcaaggacagtatcagcattgaaagtcagatcgacttttgcaagtatgaattgaaaggtgggagctgccgggtattcaaggacaaaggctattccggtaaaaatacggacaggccggagtttcaaaagctgttgggcgagatccgcaagggaaaggtcaggcgggtcatcgtgtataaactggaccgtataagccgctctattctggactttgcaacgatgatggagctgtttcaagagtacgatgtggagtttgtatcctccacggaaaagtttgatacttcgaccccgatgggccgggccatgctgaatatctgcattgtattcgcccagcttgaacgtgagacaattcagaagcgtgtcacagacgcctactattcccggtgcctgaaaggcttccacatgagcgggcaggcgccatacggttatcagttagagcctactgtggtagagggtatccgcacaaagaaaatggttgccgaccccgtagccgccgaccatgttcggctgatgtttgaaatgtacgctgaaccggaaacctccttcggagatattacccgatacttcgaggaacatgacataaaaatttatggcaaatccatgttccgtacatttctttcccagcttttaagaaaccccgtttacgcacaggccgatttggaactgtacgaatttttcaagagccagggtgcagcgattgtgaatgacgcttctgactttgctggaacaaacggctgctatctctatcaggggcgggatgtgaaagaggacaaggacaggtgcttaaaagaccagatacttgttatcgctccccacgaagcactcatttcctctgacacatggctgaaatgccggaaaaaacttatggcaaataccaccttccagcagggacggaaaccgaaaaatacttggctggccggaaaaatcaaatgcggtcattgtgggtatgctctgaaagccacccatgtaccaaacagcaccggctatttccgctgtaccaaacggacggaaaacaaaggctgtccgggctgcgggaaaatccgcaaagaagaatttgagcaattcattttctcggccatgcaggagaagttcaaagactttcagatactccacggcagggaggaaaaagtcaatccgaagctgaccgcctatcaagtggagctggcacaggtggaggcagaaattgaaaagctgctggatacgctgaccggagccaatgcgaccttgcttgcctacgccaacaaaaaaattgaagaactggacaccagacgccagaccatttcaaaggcaatcgccgaattgagcgttgaaaccatatctccccagcagataaagaagttgtcctattatctcgacaactgggacagcatagattttgacgacaaaagaaaagccgccgatggtttgatctctacgatcaaggccaccagcgaccgtgttcagatagagtggaaaatctgacatttccgctctatcgcccctcatttctattttatcttgtttgtaccccttgtacaccgatgttttcaatggttttattttttgttatgatttttttgctgaacagtgaatctgcacaaataatcagcagaataataccaatgggacaacttaggttaatttcattgcaaaaggtctattcgacaaacttttgcttgtttgtagattttttatggaattttattttatatttcattgcaggtagtgcttttttacatacagacttgaaataaccggaggtgttttttatggataaattattaaaactggaaaaatatcagttgttacataattctatttactggtgtggtatgattggaatatttattttaggattttttacagcagatacttatgttacagaggtcatgggatcgacagaagaaattgcttcttctcttgctgatatttttaatggaatggtgtatgattctacgtttcttcttatcatcatgtcggctatacttgcattgattttaggacaggaattttctaagagaacaataaacttagaggtcagtgctggacattccagaaaacaaatttttacaagtaaaataatatcgtatttaattgcttttaatcttatggctcttgtctatccagtttcagggtgcataagggaatttggacgctttggtgttgcagacgtgggaatgtttttttacaatattataaaagcaatcatttattcttgtctgcttaatagtgcgatatttctaattgcaatacttatttgttgctatttacaggatgctgtaaaagcaacttcggttacagtaattattatttttggtcttagcttatatcttggctatggaatgatgttgagattaccagtcggttttttacctacttatcaaatcagaatcgttgtcagcatgaaaaccttttttcaaccgatagctattttagtaggatgtatatggtctggtatattggtattgctttcgtggataaaatttcgtaaatgtgattttaaataggtggagaaaatgtctaacatagaatggattttaattatcataacaatatttttagtaatactgctatttcgatatattcaattaaaaaaacaaatccgtaatcttgcggatcaagttaatgaattgaattctggaaattcacagcagatgttagacatttcgttgattgataaagatttagaaagactggctggtatattgaatcaatataatatcagacaacgacaggctgttgcaggcgtattacgcaatgaagagtatttaaaagaatctgttgctaatatatcacatgatttgcgtacacctcttacagtcattcttggtcatttacaattattgcaaaaagaaaatttggaatccagtcaagcacagcgtgtaaaagtgatttttagcaaagccgaaaaaatgaaagaattggtagaaacattctatgacctttctattttggaggaacagcagacagttccagaaaaagaaaagtttaatatatctaatatgttaataaatttaattacggaaaatgccgttgcattagaaaaggagaatattttacccgaaataaatctcccagattattcaatatacgtatattctgataaaaatatggtagaacgaattttacaaaatctattgacaaatgcaattaagtattctgttggaacgataaaaataacacttatggagaaagaaaataataatattatatttaccattgaaaatccaatgagtgacagttcagaaattgattgcaatcgactttttgaccgtttttatacaggcgataaatcaagacataatagaagtacaggattgggacttgcggtagtaaaaacacttgttgccattcttggcggaaatattgttgcaaaagtacatgccaatagccttattattactcttgaattataaagtattgaagatatattcgtatgataattcattgaagagtggacatcggcagacatcataagaaaagcaaaaaaacttatgattgaaaaagggcatacttattaccaatcccgtaaattggacagagtacccaaagaagccgtggaagaattattagggattacattatcagacacaaacgattgattgtacttcttgcatatcatgtaaggagtgaaatcatggcaaaagaccctattaagaaagcacttttcttaatcgtgctactaccatcaagaaacacttttcctatttctacaaaatggaaacagacgaaatcgaacctatccatgttcaaaactggcagttgaaacttgcaaaagattttagccctaattacattcgtatcgtacagggaatactttctatcgcatttgacagagctattgttcttggaattgcgaagaaaaatccttctcgtatgataggcaatatcaaaagcaagaaaaccaaagttgatttctggacattagaagaatttcaaaaggttatttccttactctgtaagaaagactattatgaacattatctgtttatatcgttctggttattatttatgactggtatgcgaattggcgaagcgtcagcattacattggtcagacatagattttgaaacaggcttgcttagcattaccaaaacattatattaccgaacaatgacggactataaattcgttgagccgaaaacacaggcaagtatccgtactatttatattgattcagatacactcaatgagctaaaggcttggcaaagtgttcagcaacaggttcttcccgattgtccacttgtactaagttataacggaactccaaccagtaaaacaacgcttcccagagctttggaaaagttgtcaaatttagcaggtgttcatcgtattaaaattcatgccttgcgacattcacacgcttcattgcttatcagcatgggcgaaaatcctttacttatcaaggaacgtttaggacatgaaaaaatacagacaacactcggcacttatggtcatctgtatccaaatacgaatcttgaagttgctaaaaagctgactggaatattacaagtacaatctgctactgaaagcattgctaattataccagcaatcaacatacagcaatctatcacagaacagttgaagaaaaataatgcaatgaaaatgcaatcctataaaggaaaagctgtaaaacccttgtaaacaaaggctttacagcttagctccaactattcaaactcgcaaagtctggtttgattttgattatttcagtgcagttatctataccgttttgtattgataactcatactttttccacacgttattcttcgtttcacatatttttagtaccaatccagtaccattgctatattgtcattattgtgtgtagttccggtggcttgcaggtttgtttactattcacagaataaatttctgtcggtttgcaagtccacctatggaaattataatctccaagcgatatttctgcaaggaaaaattttgtggtactaatcgttagtaccacgattgttttctatatactgagcgaaatcaattacctttgctggctttctcttagcagcaatccctaatcgttccatgtctaatttaaaaagttcactcggatatccatacgcatcaaatccctctggttggcagatatctctgttcagatactcactaagttcccattgatactttgcttctttatccaactttttaccaaaatactgtgcatccattaccattctgttaatgccaccaactgatttcctaccatgagtttttgttacagttgtatcgcctgacattttaaaatactgccctatctgatcctcggaatatcccatttcctgcatcacgccatgaatcacacggctgatatacattgtatagtaattccagtttccctgctcaatatctgtcattgctattgtataacgattactagcattcacaataaacaagacatttcttccttgtattttcgtcaaatgcgtgtcccaacagaacacaagtgaagcgcctttgctttcttcaatatttgttgtttttagtcgatcttgaactgcttttgttgcaccaatctccatatgtatcacctgctcatctcaagtattctttttacttcattctgtaattcatcactaaagtctgataaatcattatatgtaattactttcagtctaataagacgaacaatatcccatattacctctgattttttcagttccatgacaactcccgaatgacgtttatcttcttttatccgtttttcaagttcccagaatttctctgatgcaggctttttatcatcattcagaaaatttgcatactctttaacaagaccttccatataattttcctgccaacctgataatctttctcgaaatagcttccaatcttttttacttatgtccatgattttgaacctcctcagtctcatgttagtctcaacaaacgatttcaaaaatgagactgtcttgagactacaactttataatttacctgcaaatcccggttttatcgcattttgctatatcatagagtctcactcagtctcaaatctagtgagacttcgttgagactaacttcggaatattcttgagtaaaagtttgggtgtcacattgagtgccatatttactgtcattcacttacttaattttccatttaccaccattatctggaccttttcgttctatgatacctttatcctttaattctgatatatatctagcaattgttctatctgtgacatctaaggctattcttaattcatcaatagaaatattcgggttttccgaaatcattttcagaatctcatatgctttagcaagcttcttcttagaatactctggcattaactgcttcattttttcttccgaaatttctatgacattttctatgacattttctatgacattttcattcacctgtgttgcataattagtgccataattcagattatacaaagtcaatgtaaaatcatcattatctgcatcaaagactggcatcttggtctcgtcaaattcaacctgaccctcgtagtctgccaatattttcttaaatccactacctctacgctccatgtatttcaaacggctgaatatatcagctaatatcggatttcttcgctttgatgggattttcaataaatcttttcccgctaaagatattccgcttaccattccacccggtgaatatatttcgattctatcatcaaacatatctatgtgaacttcactacctatttccatataatttctatgaatcaatgcatttaccacaccttcaagcactgcacgatccggataatcaggcatttcaattctgccatcatcaaccttacgccatgctttcttggaattatttcttacaaaatctgttcctgcctgtaatagtgtgacaagactgccagtatattccttatcatcaagtgcatctactataccagatgccttcgtaagtccattccaccttgtgcaaaataatctggaatggcgaaccggagattcatctgccagaagtgctcctgcattcgtcagattgcctttctcatcaatcaaaccaaaagattcataatcagtatcttcaaacgcatttcctgttctttgcttatataccgattttaattttgtgaaagacatattgctaaaatcatatcttgacttcagactatcataactttcaccacttccacgaagtaccaactctcttaactgtaaaggtgttgctggaacactttcatttccaatacgcataaatgcaatgagttgtccatcaccttcataatagtatggtgtctgctgccctttcataacctctacaataacaaaagtcttgtccccatctttttcaaacgaaagcttaaactcaggtattggattaagatgtgttttaattatctcactaattttctctgcatcactttctgcatccgcaagtcccaccagctcactatcattagatacaccaaatatcaacttgccaccaaaacaattagcaaacgcactgatgctcttgcaccaacttttaggtttcttctcttcaagagcaagctttttgtcataatctgtggtttcaccaattagctgctttatgtccatgaattcacttccttctttgcaaaaatttttctgcgtaatattgcataaataaaacattatgattagaactttattctacataatatttctctttttccttattatatccagtatttttccaagtccgacatataaatcactattgtcttcacaatacctctgcaatccaattatattcattattaaataatccagcctatgtaattccgatcccaaacaaagcttattataaaacccttctatagttgtattttttttaaactcatcatttatccgaatataatatttgtcatctcttataaatacattcttaattttttctccatccggattcaatgtatccatttcttccttttcaatccaaaatgaatttttattatgattacagtcatgacatgataagattaaatttcccatataacctgcatctttttttgtagcaaatataggagctttttcatataaaaaatgatctatttcaaattcagtcttttttatcaaatcaattgaagctccacaatatgcacatttcccattatatgctttaataaattccaacttaaatttctgagaattatcactaatatatctatgcatatcttttgcattagggtgctctatttcaactaatttttctacttctttctttttttgtgacacatcaattaattctggacaatactttgttcttctgtagtccatattcctatccctctacttttgtctgcaactcttgaaacatttttatcacatcatcaatatcattcttagtaaattcatcaaattttccttgaccattaactgaattcactattttttcgaccataactttttcccagctagtattcttttgcaattctgaggtaatttttctaacttcaaaaatatttctaatacattggtccaatattggaggaagcttttcatcataatattccactggcgtctttccgcatttaggatcatatttagaaattgtttcataatctggggcgatttcattttgtgtaataacaatcacctctataaacggaaaatatttttttagaataattttaaattcttctcctgtaaactttcctgctattgctgttctattttcaaataattttgagtctataaaaattatatttgctgatttaacatccggattattaatcaaactctcgtatcctgcatctggattgaatttaatatctaaagattcaacattacaactcgaattcttatatttatccaaatatttggataatgaagtctccggataatcatctatatatatataatttttaagttttccattatatttttcctcctatagtgaattctatttcaaatcccttttccccacatattttctgtatttctcctcctgacattgtacatgtattatttacaatccacattccgagaccatgcccgttagttcttgtagtttcatgtacctctaatattttcatcggatccgttttatacttatcattaagtccttttccattatcacaatatttaatatttaaaaatccattagtctcatttatagatatagtgatcattagtttttgcgtattttcattttgctgcacactatttaaaatcagattatcaaaaataacctgcaatatatcttctgaaatctgataaacaatatcttcatccattataatttcaatactaagccatgcgtaatctctttcccacactttttttataacagttaagatatctgctatactctggtacctaatctcaaactgttttttttctatttcttccaacatagtgtccatgaatgtcaccaatttttttccaacaacatcattactttccaacaaataaggtacatttttataagattttctcgttttttcagaagaattcaattcatcccacataccatattcttttaatgcatctactatattattgtaattatcatatatggcatttctatcatttttcatttcatgcgcaatggatgaagcttttaatcccgttgttgctaatacatttaaaattcttacatcatatttatatctagcctctaccgcttctttatctttctgatattgttttccctcctttttataacttttgatttctgttgctaattgctttgcttcttcctttgttaaaccactaacagatgtcggtcggtttaatactcgatcagaaataggtgttgctttttgcccttctacctgattcttagcatttatttttctaacaatattttgtctatatctttcaaattctttaatgcctactaatattatttcaacaaataactgataataaatattttcatctaagccttggcggttagccatatcctgaagcacagcattcttctttttatctatcatgacataacctgccatctgattttctctcacacgccatgcacccgttggatgagaagctgccgcaggggattttctagatctttttccaagtcctaaccaatctttccttccttcatatgaagatatactaaatgcatttctatataatattattccactttcaatatttttaggtgtgtttaaatacttgtataaaaatttctctttttcatcttttgatgtggaaatattaaagtataaatttgctgaaaattcgccaatatcattaaccactgtttgtatatcagcatctaaaagctccgtaattttgtttcctttcaactcattaacaatatccgttttcgtttcatatttttttatatcaatccctgaacaatattttaaagcctcattttcgaactcatctgactctactgatgtcactaagattccttggttatactttaaaacaatattacttctacaattgattccgacttcagctttaggaaaatgttccactacaatttcatcataattatctgaaatgattcttatctccatagatgtatcatgataagttctttctaagtacttatttaaattttctatgcgttttttattccacttttcccttaatcctattatttctatatctgttcctttagtgtgaatgtcgtagttctcatctaaaacagatgtattccaatctgttttccaaattacaccaacagaatctattttttttgatttcaaacatactctataccctagtctcgataatgcaaatcttccaacacctttcgaaccagcttgaattctttttttattattttcatctattatttcatattctttgctacttttacctatatgcatccaatgtttttttatatcgtctgcattcatgccaatgccattatcttcaaatcgaagtgtgtcattctgaaatgtaatttttaaattcaaggcattagcatcatatgcattcttaactaattcaagtattgcagcctcatctgtagaaaaattctgcacacctaacaattccgctatcgtactatcttctataacatactttaattcttccactcaagccacctcctaaaatttgaattcttcaatatcctttgatgtaattctcaaagaagttccactaatatgaatccctacatcttggacatacttcataaattcatcactttctaaaatttccttagcatcctccagtttatatgttttattatctgcttttggcacaatatacattcctgcatatggtatacactttttctttaacatatatactactactttttcagtgatgactgtagaaatcaataattttcttttgttcaatcctgctaatgcttgagagcgaccatattcaaaccataatgcgtttctgtcactttctcgttcatcaagctgttctctaaagtcatttaaataactaactgctccaggaaattgtgtgttaaactgctgcgttgaatatctaattaattttccatttttataatcataagggaaaattattttttccctttttttatatcgtaacgagcgcggagttgctgtttccctaacaacctttttttctatttttttgccattacaacaataaaactcatttatatcttgacagttttcctcttttaacacataggcttcatttaataaggttgcaactacatgagcaacctgaaaataatctccaaaacgccttgttccaggtatattattttttgtaaaaaaccatttatttgttaaattttcagtattaatatatattttatcctcatttgccatatcataataaatcatttcattgttcgttatagatttattaattataattatggctgattttactaatacatcatcaaacattttatcctgagtataatcatatatttcttgtaagtatggtttaatataagaacgaagttttttcccaaataccgttttaaatatactacttggaattaaataagacattttaccatcatcactcaagctgtctacacttctttcaataaatgcataacaatagtcaaattttcctttttcacatgtagaaaaattttttcttacataatctctattttcttcatctaattcttgatatgtaatataaggaggattccctacaataaattcaaattttctatcacattcccattttaaataatcttcattaacaatattccacctaacaccatttatcccccttttttttgctaacgaatttaatttctgaaggcacttcttatattgttctggatcaatctctacaccacatatatgctttgataaacctttttttatctgttgatttgataatccatgtgcttttgcatcatcaatatatcgttctgcaattacagccaaaatattcccatctccacatgaattctccaatatgttcttgtcgtatatattttcgcaatactgtatacaatccaatagtttttttacatacccatcaggagtaaatatttggcacttcttattcatttcagtctcatcactttctcgttctttcttaaattcaattgaccattttacttaggcagttaatacctatcttcaaaattatgaaatattaattacaatttacaaatacaaattccttactaattccataactttttccacaagcatctccaagttatccccttcagccatagatgctatatcttctttaccctcaaagcacttcctgagaatatctataattaccttttcatcctgaagttccttttccgacaactcttttatctttttctctatttcaatagatgcatccgcaatctgattacatcttccataagaattgcctatatcctctgctaccatagtgccatagttttctttttcatacggattaaatccataaaaagctttgcttgcaaccgggcagatagcatcatagataatctttgctcccagttctctttttatctgtctaggatatatcaatttacctttgtctgctttcatctcaagtttttcctcagccattttactagcgtttgtaatacgcataagatatgccagcattcgattagcaaaattttgctctgatatttcttgtctacctatatctgctatatattgattaatctcatgctcactaattgtctgattatcaagatacagttgatacatctttgatgcacataattttacaaccgctatgttttccaatcttttattcccaatatgatttagaatttccatctgtacccaaccatactgcttatctccaacttcatctggacagaaaaacatattttgcacatatctgtatccctgtttcataataaaatcatcaaatgctaattgatataaatattgctttgtgacatcacctacacccggttgtccactaatgataactttatctccatgtatttgataatctatacaataatattttgcatcatatattccaaagcaataatcttttttctgttcatcaacaggatatatgcataccaaatcaggttttaatgtttccaccttcggatcttctacatccggaaactctatttttctccatcttggtgatttaatcacttttcttaatgttttatctttatattcaactttattccattccggattacttaatggaagatctactattttcttatctagaacacttccaaaattatctgcacatactttttcccaaaccaaattaaaactattagttccatataaactatagctcacatcatttttgtctgttttctcgttagcaatatatgtatatattgtttttagaagattctgtttccttgtaatatattgagtttgtatctcagactgcaaccgatataatatataactcgcatcaccaaaatcagacatttcttcttgtgtcagctcaacttctgttaattcaaataattctaaaagtcctgcatctgataattctctgctacattgtgtaagaacgcattcatgtaaccgccgaaaataatcatagtcattgtcaatcgtattcttggtttgtaattccacataatatggtttgttattctgtataattgcaaatgtttcatttatagtcttatcccataaaatctcaccttctccatttgtttcaattatttctttctgatttgtatacaaaccatcagcatagtatgtctctaacaaatgaatagatacagccagtctattaaaaatcttactatcatcttctccattaaacagataaatcaattgttctgatgcattgtatttttttataacctttaaaacctgctttagattttcaaataaatgttctgttgatttgatatatttaggataacatttaaaaacttgcccctcgattacaacaactccaacataatcaaatatatattctatatcgcttgagctgtctattacatcagtcaagacaatatcttcatttgataaatcatcaaaatccggcctattcttttttacagctttaactactccatattttttaagaatcccgacaatgcgtctggtttcttccatatttatgttaattaaattgtctgttatttcctgtaaagaataatgctttctttcacgaaagaaacctttcgtcattgtctctcatcccctttttatatatttaccaaatcttcaattccaaatatgccttcaccatcctgctcaaaggctttacatatttctgaaaaaatcatctttccattctttttattatgacctataaatatgttctccggacgcatcttcataacatcttcaaacaaatacatgattactttactttcaaatgcttttatataactattctctttttgatgcatatctttaagtgcttcattatccttctcagtccgagaagcttcatcttttgcttctaattcgtctacttgctctttattattctttatctcgtctaacatatttttagatataaaaaatggtcctaaaagcttgtcttcattaactttacacttttcagatgtcaaaatattatttatccttgttcttaaactatcccagccaatataatgatccgctttattgtccttgatacacattggtatgacataatcttttattgctgcaacctgctcatcatcattgacacttaaatattcgaattcccatctacgcttaaatgctgtgtccattggaaatacgccctgatctgcactgttcatcgttgcccatatgtacatatttgccggaattctcatctcaaaatacttttctctttcttcttctgttaaatcatcaatattttttccttttaggcaatccaagttttctaataaataagtctttatatcctcgcttgtagcaattggatattcacttactccattctttctatcaagtaattgaaatacatctccaaacactgctgctacatttgctctattaatttcctctattaacaataagtaatcttcttccggatggtttattgcttgcacataaattctcataaatggacccggaacgaactcatacgagatttctttatttttattctgtggatttaaacttaaatatggtctaatagcccttccatgatttctctccacactattatcaccggcagcatcactaccatccacttttctagttttaaaattctcatccgtatatatacctagtaataatggtagacgagttaaaccttcatccttgaatttatcgtacaattcatcatatttttcttgtgctgacattgatttgtcttgcagaactgcaagcactcttctcttttcagtatcaagattgtcatatacgtctgactttgacataataggtttatatgcacctacaaaatttgcatacgaatagtttggatggaatgttactctttccatattatcagcaaaatatttgctattttcctctagtttatgactcttaccagttcccggagcaccaaatattatcctattttttgaacacgaaatgtcagttgtattttcatcatcattttccgcagcgtggagcaatatattcacattacttattttctgtcgctctcttaccctttgttcataatatacaaattcatcataatctacattatccgacattgtaacaatgttcttattatatgccaaatagtaatttagtccttctcctaaagcaccttttacaattcttaatgcaccctttgcttctccatctccattgatatcaatttcatctgttttttgtgtcatagcttcatacacggatgtcatattaaaatatacgttctgattattgtctaacattttcaacacaacatcatctgaaagataatttataactctaaccaattgtttttctaaatgtgtatcttctacattcttctttccttgtagccattcatataatacttggcaatattttttattgctttcaatcaaagtgtcaaataaatcaatattatttgtatacgataatattttctcaaatcttttcttcccagttctttctgcactatccgctttattactatccttaaatttaatagatgcaattctccacactaattcaagtgcaacaataagcgactctaactgtgaatgaaataattggttttcatttacataattcatgatatcttcttcagaatcgcctttaatatctatattatttctcaaatattgtatcaatttatcataacagttctcagatatcgttattttatcgccatctgtctcagaatactcaatttcatactttttgtcatttgacaaccatagcaaaattacaagagcaattgtagactttgatttaggcaaagatgatttaattcccaatttaggatcaacaggtttaaatttctgtatattacttggtcttttcatttaaacattcctcctatgttatgtcatttaatattgaatcggcaatcttattagccaatagcggtggtaccgcatttcctacttgtttcatctgtgaaacctttggtccaacaaactcaaaagtatcaggaaatgactgtattcttgctgcttcgcgcactgtaattgccctgttcaaatatggatgtgtaaatctacctgatgacggagtatcaaatcttgttgtaattgttacagaaacatcatctttttgcattctgcaccaagtaccactatatattgattttgttaaatgttcctctggtaaacattcctttccctgttctggtggaacaagggctaagcgttctaatgcaagcttcgaatgattagttgctttatgattaagcaatttatttgaattcattctcatcttcttttgatattcacttctggcttcgaatttataatcctgaatttcatcaccctcaccagaattaagatatgctaaatcacttattgcatcccatactgaaacttttttattaatcggtttaggcagcaagtttaccctttcttcatttgtcttttttccaataatgacggcacgtcttcgattttgcggaactccataatccgctgcatttaatacaccagcatctagaatgtaccccatttttgaaaataattcttctatttctcgcttaaaatatcctttttcagcagttaataaattaggcacattttccattacaaaatattgaggttttactaaatccaccactttaacgtaatatttaaacaagaaattacgttcatcatgtattgtttttctctttcctttctgcgaaaaaccctgacatggcggaccgcctattataacgtcaatattacctttatattgttcaaatactgattgcaaatcaagtttggttatatcttcatttatcattttagtagaactatgattctttttatatgcagttgcaatatctttatcgtattcattggcaagaaccacatcaaaccctgccatttcaaaacctaatgacattccaccaactccagcaaataaatctataaccttatatttcatctttctttacctctttaatcctagatatagctatattaaagtaattttcatctaactcgattcctatgaaattcctattgttttttacagctgacacaccaacacttccacttcccataaaaggatccagaattgtatcattttcatttgacaacaccttaacaaaatgttccattaaagcttccggtttctgcgttggatgttttccatattttttttcgctgtttgatgtaacagatgtttcaataaagtcatgcaatacttttccgttgttgttaaatgtccctgtctttgttttataagtaaaatatatccacgattctgtcgaattaacaaaatgcaaattcatattccttggcattggattagacttatgccatataccagttgtcttataatacagtccgtgtttttgtgctaattgtattattgtctcaacctttattatcgccataaatacaattattgaaccaccatccttcaaaactcttgatgcttgatgaaaaaatttattcatagattttttccattctttataatctaaatcatcccatcctgcagccccaaaaaaattatcccgcattttaactaaattagtatctctctcctccataaactttcctaaattatatggtggatctgttattatcaaatcaatcgaagatgttggtatttttttcatatactcaagacaatctccattatgtaattctgtatttatcattttcttttctactttctattctataatgcactttttccgcttttcacccactcatccacttctgaaaatttgaatttccaaagtctgcctatcttatgagcaggaatatctgtttttttaatccaacttcttatggtatctttcgttacacctagatattctgcagtttcttctaaattagaccatttttcattagtctcagacatattctccctccgattctaaaatgtataaaataacaaagtaattatatcacgaacatctgtttccctcaactgatatttcactgtttaaatatgatttattagtatttaatatatatttagtgttcaattatacatccattcttaatttaatattgggcagagaaatcaccttcctctgcccctattccacatcttatcttccgccttatctttaccagcatctctgctaacactctcatcataaattctctggaactcctcatacatttcatcaccatccagctttatctccaaccgtttcattacgtccgaaaacagtcttatacttccactcacatctgcaatatcaaatccaaatacatcagccttaacagaatcactgacattctcataaccaccaagctctgatattctcctaacaatccagccagctttatccacaggttcagtttctctaatttccacaaattcatttttatctgttacatcagttatactttcgcccactcctgccacattcacatcagacgaattatgaatctctggtattcctatgccatctaaatcagtctgttgttttctcgcactatcagattgctctttcagtctgcttatttcattctgattattgttaggattcatcacctcaacatttctatcaggctcaacgactgttgccgttgctttctcaaccgcagtatcctcttccatccccggtatctcaacatccctgtcagcaacaatctcctccttccccgacaccgcataataagccgtatacaaatcttcttttataatgtcatcagcaagctgtatctgcctcttaatttcccttttctcctgcttcagttcgtccagttcttcctgcacttccacatgccatatctgatattcccggtactgctcttcattctttatattgcgtttccgactagagctttctctgtatatctcatgctgtctgtcctcaatctgctgaatcttttcttcctgctcatttatgaaatccacaagattcataacacttttgatgtcattatttacaagcagcagatattcatcctgtaactgatgaaacctcttcaaatcctctgcatactttgctccaccaactacaaaacgcttctgttctacaacccttaatctgtatagctttgcataaaacttcttctggaatggtgacagcttcgccctgtgcagccccctgatatccgacgaataaaagtaaggctttgccatccaaggcatatccacatgatgccttagcatatcttctgaaaacatctcgtccatttttgcaagcttatgataataccgaaatcccggtgcctgtacctccatccacgcgtctttcttaaatacatatccaagtcttttcatcagatatttaaaatgctccacatttccggctgcatacgcacacatcttagcatcacgaagtataatatccttcatggacatttccttttcccacttgtccctgctaatattctttggatttctgctatactctgccagcattatggaaagtccaagctcatcacaatatttatttgtaatcggctgcagatgattcttccaattgcctttaggtgaattatacttcttgccggttgtcatactcacactattccagatcagatgcccatgcatatgttccctgtcagtatgaactgcatacaccgcctcataatcattaccaagcacatactttgcaaagtgctccagcacatacattgcctgctctgccgtcactttttcttccggtgaaaatgatatgatcacatgatagccctgccttttacctgtcttatgaaatatattcttcgtctcctccatctgctcaaatgccgtatccggcaggcagttaatactgcccaccagtacacattcttctgtcttatccggattctgtatatattccaaagcattcttcaggtgtgatgccggatttctgccatctgactcctgtatatttaagatctttgtaatcgccatacttccagcacctccccgaatgttttctttacatcatccagactgttctccaatttatcaatatcgctgcaatacaatctcccctgtgaattgccaagctttaccgtctgattaatattatttgcaatacctgctatgatacggattgcttttgccctgtcctcaggataacttgtatctatgttgccgcccgtccggatcaattctcttatataggcacttgctgtcattcccgtccggttaagtgctgcttttagaatatccatatctttctccgacagcttcacagataccttatgatctttcctgtcagacttgtatcttcgctttccatctaccatacgtttcacctctttcgtaattcttcaatgctgtatcaaaccaatctctttttatctgtaccattgcttttttcatcctttctaaaagtagtgttcactggttttgcaagatgcggaaaaggtcggaccttttcccgaaaaaatataaacgccatcagcgtttacataatttttcgtcttggcaggagcacctgcaccctgtatataatatgtggtggttaatgtaccaccacaattactgatatggtggcactttttgccatcactttactgttttagtggcattttccgccaccacttttccattttgatggcactttccgccaccatggcttttttctcgcttatctgagtggtggcgctttttgccgtcactttgctgttttgacggcgctttttgcccccacttttgcattttgacggcactttttgcccccacacttttttcagctctaatttgtgcgggggcgctttctgcccccactttgtggttttgggggcgctttttgcccccattttcatgttttgacggcgctttttgcccccacactaatgaaactgcattaccacatccataataacgatttcctctgccatcatcctggtctgtgttcttagctgtaactgttctgtaaaggaatttggatttttcggcttatgctgtttcagccacttagcttcaatatcatcaagcagctcatatgctgtttcattgacttcatctgctcgctcttcaagctccccgaaccgcaccagactcttatatctcattggatattcttccttgatatatttaatccacattcgcccatactttcctacatctatatctgccttctctgttcctgcgacaagcaccggataaaagattccatccctttcttcatatgggatgccaagcttttcaaatgttgtcttactcataatgattaccgcctttctcatcactctgcagaatatcaagcacatgctttaatggaaccagcagttcttcaacatctatacctctgtctgcttcatctaatgtctgtaattcttccagtatcgtatcaagatgcacctgtactttctttgccaccttcattccaccaacaaccctgatttcatgcttcagaagacattgtatgatataatcctgttttgaaagtccgctgagtgaaaccttcacattcagctcctgtgcttcctccggtgacatacgaaacgctactacaacatttctccatctgttcttggcatctagccttttctcgctcataataatctgctccttccgatataaaatccattcttttaatttttgcttcatatatccagcaaaacttgtacccgcattatcagactgccttgtacttataaatgcttataatcttttccgcagccgcatccatatcaatcataggtgctgtttcctctgtctgcatgatttctacatcatcatcctgctcttcacaatcctcaaagcttgcattgacagcatcaagtctgtccgccattgccacctgctttgacggaaacagatgcgaataacgatatgtgatatcaatgctctcatgaccaaccctgtcagctattgcaactgcggaaaacccgaggtcgatcagatgtgaaatgtgcgaatgccttagatcatggattctgattttcttcacaccggataatttgcaaccacgctccatctcatgatgaagaaagctctttgttaccagaaaaatcctgtctgttggtgtctggtcatataacattgcaaaatattcctgcatttcttcggcaaggaacttcggcaacttgattgttctgttgctcttaggtgttttcggtgttgtaataacatcctgcccctgcagccgctgatacgatttatttattctgactgtgttcttttcaaaatcaaaatcttccatcgcaagtgcaagcaactcacctaatctcattcctgtccagtacagcatttcaaatgcataaaatgaaaccggcttgtcaatcaccgcttctgaaaactttttatattcttcagttgtccagaaaagcatttccttcttttcttccctgcccatatttccagcctgccttgccggatttgatttcagattataaaacctgcacgcatgattgaatatcgcacttaaaatgttgtgcattgtcttcttataagtctgggaataactcttcccattctcattacggaatgcaaccatctcattctgccacttgcgtacatctcccggtgtaatctcattcatcttaagattcttaaaatatggaagtatctttgtatccacaatgtgttctttggtaagccatgtgttgagtttgacataatttttcacatcctctgtatacagcttccagaactctccaaatgtcatatccagattattctcctgccgtattttgtaattacgctcataatccaacgcttctctttttgttgcaaatcctctcttctttatctgtttattttccccagtccagtccttacaatagaatttgacaaaccaggtgcctgtcttactgtctttataagctggcatattcatcatctccttctttccatatgcagaagcagatgcctaaacccatataacttttgcacctgcctctgtctcaatcttcttacctgttgcttatcctgcatcactcataccataaatgcgttcttcaaaatattttctgcttacttttccacggattacaatataacccttcttttcaagttcactgttgatctgtctcataagcttgtatgctgctgatcttgaaatcccaagaatctgcatcacatctcctacttctaaaaacttttcgttcatgccctttcaccacctttctattaaaatttgttttggcgtttctccataccagttctgctgatgtcacaaccagcctcctcacctgagataatctcctgtaataccgcccgctcctgctcgaggtactcggtccgcttgggggagtatctacattcgctcgattcctatgaatgtcatggcaaatgcctgttagatttctgtaccgctcattcagttatttttcaataccatatcgtatagataattgaattgatattattctataccgtgtggtattgaattgtcaagaggtttttctaatgttcttgtatagaaaaacttccattttcattttttccgtgttatactgtctttaacagtccatcagagacagataaacggaggtaactacactatgacaattggtgaaagaataaagaaaatacgggtattccgtaaaatgacaatggatgaactgggcggtgcacttggatttgagggcaaaaatatgtcggtccgcatatcccagtatgaaaccggtgcacgcattcccggtgaagatatgattctaaagcttgctgatgcattgcactgcaattacaaggcaatctctgattacagccttggtgctgctgaggatatcattgaaacacttttctggcttgaagaaagtgcctcatcacttcctgcccgtggaaaaggtacaagattcccagagtacacagctcccggcaacctgattcatctgactgcaatgactccggcaaaaccttccgaggctgccagaccaacttacaatgaagatgattatgaaagtgcaggctcacctgtcgcattaacttttgaatatggattggtaaatgatttccttacggaatggtgtgaaatgaaaacgaaattaaataatggagagatttctcctaatgaatattttgagtggaaaataacatggcctcaggcgtaagtataaggagtaaatatatgaacataattgatgaatttatagaacactataaaaaagaatatgatttttatgacactgcaagtaaacttgttgcacaacaacttgaaaatgcattgcacacttctggtattcgtgcaattgttacataccgagcaaaaaatcctcaacgtctctatactaaacttatccaaagagacatcgaacatcattattcatgcatagaggatatatataatgatatatgtgatttttcaggagtacgtgttgctttatactttccaagtgacagagacaatgtagaagaaattatcaaagatactttcaatctgctacaagagccaaaaatatttcctacatctcaaaaaatcaccaattttaataaacgtttttcaggctattgggcaaggcattatcgaatatcacttaaagatacttctttaactgaaaaccaattaagatatgttaattcaaaaacagaaattcaagttgcatccgtgctaatgcacgcttggtcagaagtagaacatgatttagtatataagccactcagtggaaatctatcaaatgaggaattatctattcttgatgaactaaatggcttagttttagctggtgagatagctttagagcgattaaatgaagcagcaaaaaatagaatcaaaaacgaaaaagcttttaataatcaatatgaacttgcttctttcctatatataaaatatcaaaacaagattgaatccaataaacagataaaattaggtaatgtagaactccttttcaatctaatggtgcgatgtgaaattttgacggcttctgatataactccttatttaaaatctcttgactttacaaaagacctaagaacaataagtgaaataatcacagataatattatttatggtaatccagacagatataatatatatatcagcctaaaaacctcatctactgaagaaaatacagaattacacaccgccatagggcaatttatggaacaatggattttactggagaggcttattaattcaatatctatgaataagaatcctaattaccgcactccatttagtgcaaataacttaaaattaatattttcacccgtagaattctctcacattatggaattacggaaatatagaaatgctcttgttcatggcatgttagcacctacaatatccaatttaaaacaaatgacagacgaaataaaaatgatatgcgataaactccaaggaaaattatcataaattattcaatcatattttcatttttagtaccaaaatagtaccacaaggcaataaacaagctcgcaaatgcccattttactaggctttgcgagcttttgaaaattattcgaactcaatcgttcccggtggcttactcgtcagatcatagaatattctattcaccccacgaacttcatttataactctgctcatcactttattcagaacttcatacggaatctccgccgcctctgcagtcatgaaatcaatcgtattaacggctctaagagctacagcataatcataagttctctcatcacccataacaccaacgcttctcatattcgtaagtgctgcaaaatactgaccaattgtcttatcaagtccggcattttcaatctcttcacgataaatagcatctgcatcctgaacgatacgaactttctcagctgttacttcgccgatgatacgtactccaagtcccggtcctgggaatggctgacggaatacgagtctttcaggaagtccgagctcaagtcctgctttacgaacttcatctttgaaaagatcacgaagcggctcaatgatttctttgaaatctacaaaatccggaagtcctcctacattgtggtgagatttgatcacagcggattctccgccaagaccactttctaccacatccggataaattgttccctgtgcaaggaattcaacagtaccgatcttttttgcttcttcttcgaagatacggatgaattcttcaccgataatcttacgttttgcttctggctctgtaacgcctgcaagtttgttataatatctttcctgcgcatttacgcggataaagttcagatcaaactgtccttctggtccgaagattgcctcaacttcatctccttcatttttacgaagaagtccgtgatctacgaatacacaagtaagctgttttccaatggctttggaaagaagtcctgctgccactgaagagtcaaccccacctgacaatgcgagcaatactcttccgtttccaaccttctcgcggatctctgcaattgtattctcaacaaaagcatccatcttccagtcacccgcacattcacatacattttttacaaagttgttgatcatctttgttccttctactgtatgaagtacttctggatggaactggattgcatacagtttctcagctgcgttctcagctgctgcaaccggacagtcagcagtgtgtgctgtaatttcaaatcccggagcaatctttgaaatataatcaaaatggctcatccaacatgttgttgtctctgaaacaccctcaaatactttggagtcttttttatcaataataacttctgtcttaccgtattctcttacatctgcacgctcaacttttccaccaagtacatgagacatcagctgtgcgccatagcaaagtccgagaaccggaattccaagcttgaacagttcttctgaataagtcggtgaatccggctcataacagctgttcggtccgcctgtgagaatgattccttttggattcatctctttgattttttcaatatctgtcttatatgaataaatttcacaatatacattacattccctgacacgtctggcaaccagctgattatactgtccaccaaagtcaaggacaatcactaattctttcttcaaatctttcctcctgtaaaatccaatcaaaactatttactttatttatatatctttttctgtttttcattatagtagaggaagcattgatttacaagtatttgtttatgtaaaataaaatcttatccacaatttctattactatacacggtaattattccccttctgatctatccagaacaaagaatgtgcctcggcatcctcttacgcctgcggtggtcgcttgcgacacctacattgtacaccgcagtgcgcattctatgtatccactgttatgggtataatatatcaaaaaagatgccgaacaaatgctcgacatcccatttttatgttccattttatgctgcaaatctttctagctgtctttcaagttctgtgcaatcgtctgcatacatctgcagttcaatcacgttattcaatcccagattcatgattccaagtaatgacttcgcatctactactgcccgtcctcttctcatgtccatgttaaagtcaaatttacatactgttttcaagaaatcaatgatctcatccgggtgtttgaaagtaatgttcattgtgctcattcttttcacctctttctgccttaacggctatgaaatccttttcacttttcacatatatcatagcacattttttatatttaaaagggcgaaattttttataaaagtgtatttttttaattaaatatgactcttattctctacttttttctgtaagtaatataaaattactcctgattatgaaatcccattggagttacgtctgtattccgtcggtaaaattccttcctcctctttaaacaccttactcatatatttgggatcagagtaaccgacaagccccgcaatctgattcatcttatattttgttgtcctgagaagctcctttattttttctatcctgtatttcctcacagtttctgtaaaattatatcctgtctccttcttaaactgagaactcaggtattcttccgatacataaagttggctcgctgcttcttccaatgtaataccactgtcatattcttttcttataatttccattgctttttggataagcgtactgtactgctcaaatttatgctcatatgatatcatccgttccaagccttgaatcgctttctctatctgtttccagctgatggcataggtaatctgctgcataagactcaggatttctgtttcgttaatctccccgccataatttctataattcaatccagctgccatgcaaaaacgaatgatactgtattttatttcttttggaaaatatttttctcttttcatttcctcacaaacaagttgaaattgtctggcaattcctttcttgttttcatcgaaaatcatttctcgcattcgttgttctaattctaccggataacgcaccggaacagcttcaaatttctcaactgtctgctgacagattaaaactcctcgcggctgaagaagattccattccatgagacttcctgcctgaatcattgcatctaccagttttgtcagctgttttgtctctatccatacacaaataattgtccccggaaaattcctacataacccagtaaccacattttttttaaaatattctttccagttccttgcttcacgtacccggtaaatgatcagatacacctgtttccatcgatccgaacatataacagatgccgaaaatccacactcacgtctacagatttcttcgagaaatccacgtatattttccttctgctcctcgtattcgtctgccattgaaaccgtaaataaatatcccggatcatccactgtaaaaccatatttccggatagtcatttcatttaacttctgattcgatataatttctccatatctacagcttaacagaacattttcaacagtaaaagaagcctgcatccaatattcattcctgattttttcatgaatacggcttaatgccttcttaagctccatcggccggaacggctgtactaaatatccgtccacccccagatcgattgcctgctttgcctgttgaaaatcttcatcctttgttataataatcacacggaactcacgtccttccgtgcgtaattttctcaaaagatttaacccattcatccgcggaagcccaatgtccatgataacaagatttggctgcataactgttatcatctcatatgcagactgtccgttccctgcaatccccgccaactcgtaattcggatctacgcgttttaaaccttttttcagttcttctaatactttttcatccctttcaacgattgccacccgcatttgaacagtctcctctcaatgtccgtgtttctgattgaatatcctcttttattgtaacattaacttcaataattggaagcatgcaagtgtaaatatttttctctggtagcgagccctccccggatgtgacgttctgatttgttggtgtctaaaaccttacgtgtttcatgagccagtgatggattgatctgaagcagacgttctgtaacatccttatgcaccgtactcttactaatccgaaactgttttgctgtctgtctcactgtcgcattattttctataatataatttgcaatttccactgcacgctcctcaatatattctctcatagaaaagcccctgcatagtttgttttttacaatctatgcaggggcaaattaatgtatgtctaattcctgttccatctattcgtggaaaacattatactatacaacttaatactcaaatactgccacaccatatcccggaagaggatatgcaaaggaatatttctgaccatcacattcctgtttctctggcttgtaaaccaatgggcgttcttctcctgatccgccgtattttgtctcatcactgttaagaacaagcttaaactgctttcttctcggaacaccaacacggtaatctggtctgtctaccggtgtaaaattgcatacaaagagcagatttttcttaccatcttttgaatgtcttgtgaaactgaaaatactccggaagatatcatccttattgatccagtcaaatcccttcggatcattatccaactcatacaatgccttattcttcttataaagatgaagcaaatctttataccagttctgaatctgctgatgtggttcttctgcaagaaggaaccaatccagttctctctcttcactccactcacgaagctgtgcgaactcctgtcccataaagagaagcttctttccaggatgtcccatcataaatgcatatgccaccttcaagttgcggaacttatcccatccttctcccggcatcttattcaacatggagcatttcagatgaacaacctcatcatgagaaagtacaagaatatagttctctgaatatgcatattccatagaaaatgtcatcatgtgatgtgcattctttctgaaataaggatccagtttcatgtattctgtaaagtcatgcatccatcccatattccacttcaaagtaaatccaagtccgtcatcctcaggagatcctgtcaccttcggccatgctgtggactcttctgcgatcatcataacgcctttatttcttccgcaaactacagaattcagatgtttaaagaatgcaatcacctcaagattctcatttccaccaaatttattcggaatccactgtccatcttctcttccgtagtccaaatacagcatagatgccactgcatctacacgaagtccgtctacatgataatgttcaacccagaacaatgcattcgccagaaggaagttggaaacttccggtttttcataattgaaaaccttcgttccccaatcaggatgctcgccctttctcggatctggatattcgaatgtcggtgttccgtcaaaatctgccagaccatgtgcatctttcgggaaatgcgccggtacccagtcaagaataacaccgatattattcttatgaagataatttaccatatatgcaaaatcttccggtgttccataacgtgaagttggtgcataatatccggtcacctgatatccccaggaaccgtcaaacggatgctctgcgattcccatcaactcaacatgagtatatcccatctcttttacatactttgtaattgcttctgcaaactcacgatatgtatagaatccttcatcttctcttccaggatgtctcatccaggaacccatatgcacttcgtaaatagacactggttcttctttgttatcccacttctcacgagctgtcatccacttactgtctgaccagttcagattagaaatgtctgtaattctggatgctgttcccggtcgaagctctgcataattagcaaatggatctgctttatagatcttctcacccgcctgtgtctctatacagaacttatacaaatccccttttttcgcctccggaacgaagcatgtgtatattccgagagactctcctctcttcatcttatctttcgtctcatcccagtcattaaactctccgattacagaaacgtttactgcatgaggagcccataccgcaaaatatactcctctttttccgttctttgtcacctcatgggcacccatctttttataaatctcataatgatttccctgcccaaaaagataatggtcaagttctccgatctcataaggctgcactttcgtcttcgtgctgtttttcttaaccataaagccacctcactgctcaaatatattcctgattgtaatgatttaaaaaccatacaatttcttatagatcaaggcacattaccgaatctttcaattggtaacaaagtttcattctccccttgaacactatagttttattatacttgatactgtataaaaaagaaagagaaaatgtattattgcacaaaaatagacagtcgttttactgactgtctattaattcttaacaaatatatgtcattaaatgttgaaatctttctctgaaagcagaattctgtcggaagaatctgtattctttccaaatactctcttcacaagtttctttgcggaagctttttgtgaatgagcaatcgcatcatccatcacttctttcacttctgctactgttactgcatgatcttctctctgtaaagaatcaatcttactgtacagtgcaagaattcccatctcatcgattctgtaaccattctcctgagcataagtctgtccaaatgttacaagctcatcattaataaagatcggcacttcaagtctggaagtaaattttcttctgaattctctgttggaagaaagaagtctgtccagtggttttctctgctcttcaagaactaccaaaagttctcctgtatcctgctccattgctttgttcagcttggcgagtgttttttcgttcatctgtccggctttttcaatgatcagtgcaccgccgtacaatttacggaaaatgtctccgattctcttcttattcagtgactcacctgtcacaattgcaaccttaccctgacggatatcacgctgcttctgaattgcctttacaacatcaacagcgaggactgtctttccatttcctttatttccaataatcagaaggtttcctgttctggaagttcctttgcggtttgtacagttcttatcctgctcaagtacatctaccagctgctcactcataccacgcacaggtacaaaataagagaagagttttttctgttcctctgtaagtcctgctcttgtaccgattccactctgtgtttcaagatcataacgaccatgtacaataaatcctgtatcagacattgcatctgcaatctcatctaacggtaatggtgatgtcttacctgttgcgatcaattttgcagtctctttacggctcaatggtgtcgtcgcagacatgatatcaattccatcatcttcatccggaatctctctgtcatccggttcctcactatgcgctggattcacgctgaattcatcttcaaaatttggcacttcttcataagaattcagaccaagaagatcatcatctgaaatcttatcttctgctgtgaaaagatctcttggattaattacttcatcatcctcatcgtcttcttcataaccataggcatccagatcatcatatccttcttcctcaccgaacagatcatcatcagactcttcataatcatccggcagatcgtcatcagactcttcataatcatccaacaaatcgtcatcagactcttcataatcatctaaaatatcgtcttcgtcaaactcttctgcatcatcccagtcatacgcatcataatcttcgtactcatcctcaccgagtctgagatcatccgcaagctctcccatattttcatgtggttcttcttctacctcaagaacttcttctgaacttactgttgcatctacttcttcctcttccggaataacaccttcaatctcatcaatcagtttctgtatctctggtgataaaattggttcttcattatttttattgtccatagtctctcttactgctgctccttctgaatcatcttcatcattgacaacttcagtttctgagatcagttcctccacctcagacaaatcttctgattcatctgtcagatcttctgactcagctgcatctatttcaagaatttcttcctcttccggttctgcttcttctacttcaaggatttcttcctcttccggttctgcttcttctacttcaagaatttcttcctcttccggttctgcttcccctgcttcaagaatttcttcctcttccggttctgcttctcctgcttcaaggatttcttcctcttccggttctgcctcttctacttcaagaacttcttccggttctgcttctcctgcttctatagtaactgcatcttccgggacatcttctgaagtctcctccactgcctgttctataagcttttcttctgtctccggttccggtatcagttctttcatccctgatggaactactcgttctttactggcttcctcagctttcttctcttctgtcagttgattcacgatctcaagatcttctacatcctcaattgctgcaatatcctcttccagatctgtcatatccggttcgacttcttctcccggttctgcctgaacttccggtttcggattgagtaattgctgcagagcttcatctaaccgcatcgtatctccaagtttcttcttgactggttttaccggattcttaccgacaatcggtatggaagcagtatctttgctaagtgttctcttatctccacttgtctctaccgttgccggctgaacttctgactcatcctcggaagcttctataacttctgctgtttctactcctgcttcttccggattttctacttcggcatccggctcttctgccgcttccaaagtaaccgcatccgtgtcaatcacatcggaagtactgtcgttctccatcaccggctgttctgtcagcccgattgatcttgtatctccaagtgcttcagctccttctgacgcagaatctttttcctcgtcttctcctaaataggaagtcagatccggtatttcttctgtctctgaagaaagcttctcatatctgtgatcatatttctgctgctgcgatggtgacaatggcttatactgcatcttcagttccattgccttataaacatacttaccctcgctgaaccagaggatcagatcatcacattcttccagacattctgtcatcatacctgcttcgcgataaagcttcgccagttcataagcccactcttcaatatattctgccttcttaaattcctccagagcctcaatctgctgttcgatcggcgctctctgcgctcttaagatctgatatctaaggatatgcctgttcggatctttcggtgcaatctggataaattcgtcataatagtcgattgcttcatctatattctttgtcttaattgcaagagaacataacttatagatcaccttgcggcttccttcagaacggcgatatgcaagattcatcacatcatagctcttctgatactcttttgttttttcataaatatcactgacattcatcagcatccctgcgttacggacacgcttccagtcaatcagatctgctgctgccgctgcttttctgtattctccatcttccataagttccagcatctcttctgtctttaacttatattcatacttatccactgtactcacctcattgtcattgaaatattagttttggtctgaatgtgtccattaggcactagccgatactctttcattattctaccatatgaggtctgtaatgtcaaaaaaatgcaccttcaattccttttgaaagtgcatttttagtgttatttaattgtattattattataattttatattttgtatcggagattattcgcgattctacgttcctgtgagacctttgtcgtctgttattttatcacctgaatgattttcatatccattcaatactttatgtattaaatcttctgtcaagtcattcctgcttttataacaaatctgagattataacatgtcctttcaatgtttctttacacatttttcattctatgttatatgcggtatttttattcaatacatctatgagtgattcatctttttctctttgcttccagtttccgtactctccgatctttgatcttcttttctttctactggacttttacgcttggcaaaggtctctttcttcacaggaaccttcactcatcataccactgacatattgataaaaatctgaaactatactgtccatgggactgacctcctgttgaacttgtatttttaatctaatcaggcatctgttacttttgccttcttagttaaatatctttgggagatttctttctctctttgatggttatataataacattcggcgtctaatttgtcaatatattcctttgatttttttatattttttatttattatctgctttggttgtaattgtctgaattttcaaacatttcgattaacagatttctgctccagccggcatttctttttccggtgtcatcagtgcaaggttaccttctgcatcttctgcacaaagcagcatcccctctgaaagtacgcctgccagcttcgcaggtttcaggtttacaagaaccataactttcttaccaaccatttcttccggtgtgtaatgtgctttgattccggatacgatctgttttacctggcttccaacttttacctgagagcagagaagctttttggatttctttacagcctcacatgcaatgatctctccaacctggaactgcattgctccgaactgctcaaatgtgatctcatctttcggctcaatgtcgataacagcttcttcctctttcttttcttctaccttcggatgaagttcttcaactttcttcataacctcttcgagatccattcgctggaacaggatctccggtttctctgttacatgtccgttaccaagctgctcaaggatcttcttacttgtagaaggcataaaggattcaagaagtcttgcaccttcagaaatgctctggatcagattccaaagtactgtagaaaggcgatccttcttggattcatcttttccgagtacccaaggagttgtctcatcaatgtatttattgcagcgtttgaacagattgaagatttctgtaatcgcatcggcaacgcggaggtctgccatcttagcatcaactgctttagaagcattctctacaactgctttcagttctgcatctacatcttctacaacacccttatcttctactgttccgccgaagtatttgtttgtcatagaaacagttctgtttacaaggtttccaagtgtatttgcaagatcagagttcaaacgctctaccatcagctcccaggaaataacaccgtcattctcgaatggcatttcatgcagtacaaagtaacgaactgcatctacgccaaagaaatcaacgagttcatctgcatagagaacatttcctttagacttactcatcttaccgtctccctgaagcagccacggatgtccaaacacctgtttcggaagtggaagatcaagtgccataaggaagattggccagtaaattgtatggaaacggatgatatcttttccgatcagatgaaggtctgccggccacagcttgttgaactgctctgtactgtttccgtctgcatcatatccaattcctgtgatatagtttgtaagagcatcaagccatacatatacaacgtgctttggatcgaaatctaccggaattccccacttgaaggatgttctggatacacacagatcctgaagtcccggaagaaggaagttgttcatcatctcgttcttacgggcaaccggctgaatgaactccgggtgtgtattgatatgctcgatcagacgatctgcatatttgctcattttgaagaaatatgcctcttcttttgcaggctgaaccgggcgtccacagtcaggacattttccatctacaagctgagactctgtgaagaaagactcacatggtgtacagtacattccttcataatgtcccttgtaaatatctcccttgtcgtaaagtttcttgaaaatcttcttaacctgtttctcatgatcttcatctgttgtacggatgaatttgtcataagatgtatccatcagatcccagattcttttgatttctgttgatacattatctacgaattcctttggtgtgattccagcctcctcggctttgagctcgatcttctgtccgtgctcatctgttcctgtctggaagaatacatcatatccctggcttctcttgtaacgtgcgattgcatctgcaagcacgacctcgtatgtgtttccgatatgcggtttacctgatgtataggcgatcgctgttgttatataatattttggtttttctgacatttgtctgcctccttttcccacaatgtgggattcttttctcaaattccagtgactactattacgactttctgctggatctttcgcgaaaaaagaatgtgccaaggcacattcttgcacttgcggcggtcgcttgcgacacctactttgtacgccgcagcgcatatccctagcggagcgtttttaatatattaggaaagaacctaatatattaaaaaacgccctcccagggacttgcatccctgagaagacgaatcctacttccgtgttaccacttctcttcgttccttcctcgcggaaagaaacctctatgagtatctgcactttcgttagtaaaaactgctttgttaatcaaaaccactttgaatactacggcatttctcactgttgatactcttcgctataaagggcgaatcccttcacagactaacccggatctttttattcaagattgctgcttaaacaactcacttgctcactctgttcaggctcatctgcgctgctcagaagccatcttcatctgtcttccatccatccctctcaacatccggcctgacagccttcaggacttttctgtagaatctgttacagactactctcttcctcatcgcgtttcgcttatcactgcttttcattccttaaaaagggtagcataacgcgaatagaatgtcaagatacaccgcttgatgatttctctgctaattcctctgttaccccggcagcatttccttttgctttcactcttggaaatgtaatatctacccggaacaaatctccgtccagatacagatcaaatgtacctccctgcattgttgtaaggctcttcgctatagaaagtcctaatccacttccctccgtacttctggaaatatctccgcggataaaacgttctgtcagttcgtccgcctgaatattcaactgatgctcggaaacatttttcaatgaaaatcttacctttgtatcatctgttttcagagtcgcgtaaactctggttccaggcattgcgtacttggctgcatttccgtaaatattttccaagacacgccacattcttctaccatcaacatgcacaacagccggttctgccggaagatctgtgacgattgccagatttctcgcctcgaatttttcttcgagttcaccctgcgtctgctggatcatttccgacagatcaagatccatatattccagggaaatattcccgctgctgactttcgatgcttctactacatcttctgtcaatgtcttcagtctctgtgctttctcttccagaatgttcagataatcctgaactttcggatctgccggatctgtttgtcttaagataccgacatagttcaaaatagaagtcagtggtgtcttaatatcatgagaaacatttgtgatcaaatctgtcttaagacgttcgtttttcattgcctcggcaactgctttgttaagtccggttccgatcccgttgatcatcaatgcaaatttcttgttctccccatgcagtccgtcgattggaatctgataactcatatttccggcagcgatctcctgaattccttttctcaatcgattcttctccatcacatttgcaaccatgtaatagaatagcactgcatcagcaatcagcagcagaatcaccaggaagaaatctccaccccagagcacgaaaagctgaaacaggaaataaagaatcaaaagtcctgctgttttctttgtaagcttcatgtctcgtaatattttcccgataaatataccgaagcttcgaagcagactgttctcccacagactctttgccttaattcttcttaccagactaagatagccggcaaaaaagcaggtaaatgtaaatgttccatatgcaaacgcacctactgattctccgagacttaaagtctgcatatatacattcggaacataggatgatggaataaatgtatcactttccacagcaccgtatgaactactcaaccctgtaattccatcaaataagatatgaattccatcgattcctgctacaaaaaagaaataacttccaatcacccagacaaaaataacaactgcagcagcaatctctgtcttccaggaatcgaactttaacaaatgcagttcttcatcctgcggttttcttccggcacccaatgtcagccacactactgtgaccaaaaagagtacgctgctgaaaatcataaaatataatgccgctttcatatgcggaatgttattttgatattcgatgctattctggtaaaactgatcctggatcggatagtttgtgtccactgcaactgcaaaaacatctttccactttgttccgccggaatagtaaccataagaacgtgtattgagccattgatccgaataagaaacgttcatattcgtcttaaaatctttcaattcaggatagattaccatatatttcacagggttctttgacgctgattctatcatgtcttctatgcttttctttacatctgcataatttgcatattctgctttatttgtagtaaccttctttgtcgattcatctgcatacagataggtaaaattggtattcccttcttccagataattccaaccgccttcataatcctgccagtcttcatagattgtctgcaatgctgtggcaatattatcataaaccaatgtcagtcttccatttaactgcggattattatttacaacctggagtagattatccgctccgaccggtgcatatttttcaatcattgactgaccaaagttccagcagtctgtataaagcagctcaccgttttcatctgtaatctgaaatgtataataaccggaagtcgtaaattcgcccgcctgcaatcctgccaagaactgatctctgtcctgctcgcccatctgaaattgaagttttcctgcatttacaagagaaaagaaatcattcatataatagtaataataatttccgtccggtttctgacagacaatcacgccattctgtttgtaaagattgtcgttatctgtcccactgtaagtctcgccccaatttaccagctcttccattgtgtacgtgacaccggacagattcgtctcagatatctttcccttctttgacagttccattacatccaccagttttttcggattgtaggcaccgtcactttcaaaaagattctgcagataaagcttctcctgtacatcgtacatgtaactttcaaccatcttgctgaattcttcggattcttcaaaagactgtgtattcatcttttgaatctgtgacaaactcattccccccgccagtgtcaggagagaaagcaaatttgtcacaagcaatgctccgctaagaatcgccacaacaagaacgattgtccttgtcacagtcttcctgtaccatttcttcattgttaacccttccttatatgccttcttatgcatttttatatgttctcttatatgctttttctatccatttttacatgtgcttttgttactgttcgcactatgctttttcgattttatatccgacaccccagactactttcaggtaacgtggatctttcggattgatttctattttttctctgatatgacgaatgtgaactgcaactgtgttatccgcaccaattgcctcttcattccagatggattcgtaaatctgattgattgaaaatacttttccctgattcttcatcagaagcaaaaggatattgtattcaattggtgtcagtttcacaaattctccgtctactgttacctgcttgagatcatcattgatctgaaggccacctaccttataaatcgtctcttttggctcctgtgctgttccgccaagctcgttaaatcgtctcagctgtgatttcactcgtgccacaagttccagcggattgaacggctttgttacataatcatccgcaccgatattgagtccaagaatcttatcggtatcttctgatttcgcagacaagataatgattggcagactgttcttctcgcggatttttaatgttgcacggattccgtcaagtcttggcatcatgacatcgatgatcagaagattcacttcctctttctccaaaatctccagtgcttcgattccgtcatatgcttttaaaatctgatatccctcctgagaaagataaatttcgattgcttctacgatttctctatcgtcatcacatactaatattttatacattttacatacccctcgataattgctgacaccgataacagcgcagcaacataattatcacatgatcaagttctaactatagtatacatgatacttgatggtttttaagagatagattggaaaaatattaggaatttcttaaatcgacgatttaacaatttaaatactttctatttcttgcacatcttttgccaacgttttataataagaaaccgtgagccactttagaacataagtgtagctgcacaaaaatgattgcatttggtgctagaatctcttagtatagctgcaatccatcaataaaaaggagtataaattaagaatgattgaatttttgaaatccttcctctttggaattgtggaaggaatcacagaatggctgccgatcagcagcacgggacatctgattcttttgaatcaatttgtgaaattagatgtttccgaagaattctacagtatgtttgaagttgtgatccagctaggtgcgattcttgccgttgtcatcttattctggaaccagatcttcccatttggtgcaccggaaggaagtcacacggtcagacgccgtcaggcaaaacatgcacatagaaaaaagaaagccggaaatggaattttaagttatgtgaagatggatatcattatcctctggctgaaagtccttgttgcatgtatccctgcgattgtgatcggaatgccgttcaatgatctgtttgagaaatggttttacaattacccttgcgttgcgattgctctgattgtcttcggtatcgcatttatcattgttgagaataatcacaaggacaaacctgcgaagatcaacagtatggacgagcttacttataagactgcatttttgatcggacttttccagctgatcgctgcaatcttccctggaacatctagatccggtgcaacaattgtcggtgctttgatccttggagtatccagaaccgttgctgctgaattcactttcgtacttgcgattccggttatgttcggtgcaagtcttctgaagcttgtgaagtttggtctgaactttaccggaacagaagcaataattcttctgattggtatggtaaccgcatttgtttcttctattatcgttattcaattcctgatgggatatattaagaaacatgatttcaaagtatttggatattacagaatcgtgcttggtattcttgtgatactgtatgcgttgtttttagcgtaagatttcctaatatcaaaaactcccaatagaatttcagctcagatgctttctgaagcatgattttctattgggaattttttatttgtcagttattactattcttgaaaaaatcctttcaatgccggatacagtttcttaaattcctgatatctttcctcgtacttctgcaccagttccggatccggttcttctgttcctgttactttcacaagtttcttcgcagcctcttccaccgaatcaaatacaccgcatccaactgctgccaggattgccgctccatagcccggaccttcttcgctttcgatcagatctactttcatattcatcacatttgcaatgatctttctccacagcggactctttgctccaccgccacagatctttgttctctctggattcacaccaatacttcttgcaacttccagagaatcacgcagtccgaatgcaacaccttccagcactgcctgtgtcatatcttctcttgtgctgtccatagacattccgataaatgctgctcttgcggaaggggcattatgaggagaacgctctcccatcagatatggaagatagaacacatggttctcgccgagccttgtgattcctgcctgttctgccggataatcttttgtcttaaggatttcatccatccaccatttattacaggaagcagcactgagcatgcatcccatcagatgatagttaccgtctgcatggtcaaaggaatgcagcgcattgttcttatctactccgaatttcttactggaaataaagagtgttcctgatgttccgagagaaatattgcatccgccgtctccgaccgttgccgttccaactgctgccgccgcattgtccccggctcctgcaattacttttacatcctctgatacgccaagttctgctgcgatctctgctttcaaagttccaacgacttcccagctttcatacagctttggaagctgtgcctctgtaataccacagatctcaagcatttccgcagaccagcacttatgctccacatccagaagcagcattccggaagcatctgaatactctgtgcaaaaagaacctgacaggcggtatgcaaggtaatccttcggaagcataatcttcgcaatctttgcaaaattctccggttcattttccttcatccagagaatcttcggtgctgtaaatccggcaaatgcaatatttgctgtatactctgaaagcttctcttttccaatcacctgattcaggtaatcggtctgttttgcagtacgtccgtcgttccacagaattgccgggcgaatcaccttgtcttccttatcaagcgcaacaagaccgtgcatctgacctccaaaactgattccctttacttgatccttatcaaagccttcaagaagctctttcagcccttccatactctgtgcaaaccagtcttccggtttctgctctgaccatcccggatgtgggaaatataacggatattcttttgatacgatattcttgatctttccattctcatccatcagaagaagttttactgcggatgttccaagatctactcctacaaataacatgtcgtttctcctgtataaagacagaaagccttgccgtttccggcacggctctctgcccgttttctatgcttataactttctatgtaattaaccccacggattctctgttggatatcttacacccttcggctggttgtatccgatctcttcaaccggcacaccaatgtatttaaatacttcgaacaatgcttttccaaagtgtccgaaagcaactgctccgtgatgtggataattcttttcgatcagtacgtgacggtagaatcttcccatctccggaattgcaaacactccgatagatccgaaggattttgtagcaaccggaagtacttctccctgtgcaacataagcacgaagtacattgtcagatgtactctgcagtctgtagaatgtgatgtctccaggtttgatatctccttccagtgttccctgtgtaacctcgattggaagagatcttgccatgatcatctgatatttcatttcgcagaaagcaagtttgccggaagctgtatttccacaatggaatcccataaatgtatctttctgtgtatatgggaattttccttcgatgctctctttgtacatatctgccggtactgtattgttgatatcaagaagtgttactgcatcctggctgacagcagttccgataaactcgctgagtgctccgtaaatatcaacctcacaggataccgggattccctgagctgtcagacggctgtttacataacatggaacaaatccgaactgtgtctggaatgccggccagcattttcctgcgattgcaacgtattttctgtatcctctgtgctcctcgatccagtctttcaaagtaatctcatactgagccagtttcggaaggatctccggtttcttatttcctgctccgagctcttcttccatctcttttacaacggccgggattctctcatcaccttcatgtttattataagcctcgaaaaggtcaagttcagaattttcctcaatctcaactccgatattgtaaagctgttggatcggtgcattacatgcaaggaaattcagcggacgcggtccaaagctgatgatctttaagtcacttaatccgacaactgctctcgcgattggttcgaactcatggatcatatcagcacattcctctgctgttcctaccggatactccggaatgtaagcttttactcctctgagtttcaggttatagcttgcattaagcattccacagtaagcgtctccacgtccctgtgtcagattatcctgtgtctcctctgcagctgcgacaaacatcttcggtccgtcaaaatgttttgcaagcagtgtctcagaaatctccggtccgaagtttccaagataaacaaccagtgcgttacatcctgctttctttacatcttccagagcctgcaccatgtggatctcgctctctacaatacagatcggacattcatagacagttccttcaccgtatttctttgtgtaggcatcgatcaatgcttttcttctgttcacggaaagactctccgggaaacaatctctgctcactgctacaacaccgatttttaattctggcatattactcataataaaatcctcgctttctttatacttgttattatttctatctttctcatgttacgttatccacacttttcctgtaatttcatttggttttccacacatcatgcagaaaccttgtgaataacacgatcctgatttttggaaaccccggcatccattttcaatcagacttcgacgttctcaccttttaacccacagaacgcaccttcaatctgtgcatcctcatgcgcgatcagccatttattcatcgctgcaagaagtctgtttcctgtttcgtttgtttctatggtcattttaccaacttaaaaaggcattatcgaccaaataattagccaaataatgcccatttcttatcttttctttctgaaagtgaaatatgccttagcatcctaattcggcatacctctctcattctattccacgacccattattccttcggtggcaggaatcccttacttgtcttcacgatcactttatcaaacaccatgaacatggacggcagtacgaagattacgactaccatactgatcagtgctcctctcgccatcaggatacacagggaactgatcatatcaatgttggagtaaagtcctacaccgatcgttgctgcgaagaagctcaacgcacttaccatgatggactgtgcggatacgcggtgcgcagttgtgatggaatcgtatttacttgcgccatggttacgctctctcttataacgagttgtcataagaattgcatagtctacggtggatccaagctgaatggttccgattacgatggatgccacgaatggcaacttagttcccatgtagtatggaatacccatattgacgaaaatcgcgaactcaataacgcctaccaggatgatcggcagtgagattgacttgaacagaagcattatgatcacgaaaataattccgattgatactgcacttactgtcttgaaatctttatctgtaatgtcgatcaggtctgctgtcagaggaccttctccaatcagcattccacctttatcatatttatgaagaatcgtattcagttctttgatctggtcattcagttcatctgtagctaccttatattctgagttcgccagtacaagctggtacttatcattctttaatgatcttgtcactgaatccgggatcatgcttgccggtacggacggcccaatcagggagtcaagtccaagtgcccatttgattccgtccaccttatccatctcattcagcattttgcctacggccgccgaatctgtagagctgtctacaagaatcatgtgcgtcgtattcatgtcgtaatcttccttcaatttctcatttgcaatgatactcggaagatcttttggaagtgtcgcatccagattgtaataaacgcctgtatggttgtttccgtagattgccgggaataacaaaacaataaagagcgctacataaatcagatatctctttgtaaccttgtctgaaattcttccgatatccggaaggaatggtttatgttttgtcttctcaataatcttgtcacaacacaggatcatggatggaaggattgttacgcaggcaagtacaccaaggataacacccttaaccataacaacaccgatatcaagtccaagtgtgaatgacataaagcacagtgcgataaatccggcaattgttgtgacggagcttccaattacagatgaaaatgtctgtgagattgcatgtgccattgcacggtgtttatctccgtcgtaacggatctgctgttcttcgtaactatgcatcaggaagatcgaatagtccagcgttacacccagctgcagaactgctgccaatgcctttgtaatataggagatctctcccataaagtagttacttcccaagttatagacaattgcaattccaatactgagcatgaagaggatcggtacaaagaacgattccattgtaagaccaagtacgatcatcgccagtacaaccgcgatcaatacatacaacggtgtctctttctccgccagctccttcgtatctgtaacaacagctgacataccacttaaaaagcactgctcgcccgccagagaacggatctcggagattgcttccattgttccatccgaagatgttccttcatcaaaaaagattgccatcatcgtcccagtctcggaattaaatgcatcataaacctttgtcggcagcatactcttcggcatactgatatctgcgatagaatcataccagataacctcttttacatgatctaccttctcaatcttctcttttagcttcgatacatccttatcttccattccatcgactataaacatcgaaaatgcacctgtaccgaaatcatttaccaaaatatcctggcctttcatcgtctcgatgttatccggcaggtaagttaatacatcataattaattctcgtatgcagataccccaatgcagacggaatcaacaataagatactgagaatcagaatcggcactctgaattttactatcttttttccaaactttaccatcatatcctttttcgcttccttcctcatattcagtttatgaccattggtcattttaatctcttcttgcactatacaataaaaatgactaacagtcaatatattttgtactgttagtcattttttctttttatttatattccattttcgtaactgttcagagccaacctctaaactgttcagagccaacctccaaaatgctacgcatttcgtcggtgtggcgtatccgccaaataaaatttcaaaaacagttttaaaaatgcaagcatttatgcctgtttttgaaattttgcttggctctgaacagttacccattttctctatattcacttggaagaattccgtattttttccgaaatgcccttgccatcgccttgcttccggagaagccgctgcgaagtgctgtctcagtgatattatattttccgcccttcaggtctttcattgcatattccagacggatattctgcagatagctcttatatgtgattcccgcatacttctgaaacatcctcgacaagtacgttggtgagtagccaaaaattcttgccacttcttccagactgagttcctgtgcataattctctttcatataagatgtgattgctgaaagcttgttcagattcttattcttccttacaaaagcatcctcaacttccgtcagacggtattctttcacaaggagatataaaagatgataaaaaatactgttcatcttcatgtcatatccacactgcttttcgcaatatgtcttatacagttcttccaacaattccataaagcgcgcgtccttacgtcccggttcatgcgtaaaccagataaattgctctcctgtataatatttttcaaaagctttcaacggaatctgaagaacgatcgtctcgtttggcaacggagaatctacttcatgaacctcattcgaattcacaatcataaattctcccgctgtcagatgccaggtcttctcatcgatcttaaattccagttctccgtcgcacactgcaaaaatctcaatcgatctgtgccaatgtttttctctatggtaatgtccttctctgccttcaaataagaatagtttaaaaggaaatccaacttccggaacgatcaattcatgcgcaaactgcatctcttttattcaccacactttaggctttcgtccacttatgtaccgtatctgttcccggactacataattccactgtagatccatcatctgacagtgtatagacatattccagtgttccaccggagataaccagattcagcctcaatgtaccgtctgcattctctgcaacacaatatgttccctttgtttcaccggaggaactcttgatcacaagctttccgtccttctttaatttatattcatttccgctgttgtctgtccactttccgatcagccccttcgcacggtcatccgtcagatccagaagttctgtatccgcctggagtaattttatatccttaccaccatccagggactccagcactacgccatagcctgtatcatctgtcgtaaccgcatacagtttaccttcgtcttcgccgtccattgtgatcttgattgtaatgttgttatcctcatcaaatccacactcaaatgtcagtccggcgtcatccttagttcctgttccatcttctttcagatcatacacagtatctgttccaatcaccttccactgctttgccataactctcttaacagaatcacttggaagaaccgcgttgtctcccatctgttctttcatcgtactgcttgctttgtccacctcttctgtcgtagatgcagccggttctgttttcttcgtatcgccgcatcctgtcatacacaatgtgcttgccagaagtaatgctactactaatcttttcatattctctctccagtcttgttactgttcactccgtgtcaatcagcgaagtgattgacacgggagtgaacagtaacccagtcttttctatctgatcagaaagatagcattccgatcaggacttacagtctttagagtatcacaaacgcactgtaaattccagtaaagttaatacaatttcacggttatttcatttttagacacactcgttttcgtttgttttcaacaaactttaatgcttttgcactgtttcactttacctcgacagcttgtttattttcttaacatatgatacactattcacaatgtaaaattataggtaacttgggaggaaataggttatgattatctctacaagagggcgttatgctctccgagtcatgattgatctgtctcagcaggatccggactcttacacaccgctgaaagagatcgcagcacgtcaggagatttctgaaaagtatttggaaaatattttaaaatctcttgtcacacaaggatttatccttggacttcgcggaaaaggtggtggctaccgcctgacaaaatctccggaagaatacactctcgcttccattcttcatgcgacagaaggaagccttgcagctgtagcgtgtctggaggatcatgcaccggaatgtgcacgtgcgggtcagtgtccgacacgtccgatttgggaaaaactggataaccttatcgaggattatcttggaagtatcacacttgctgactttcatgaaccggccattccatgcaaaattgagaaatagcattatttcagggggaacgaaataacagttgtttcaatacaatggaaaatcagatctacatagaaaaagatggataagtaatacttttattgcttatccatctttttctgtttctattttatctaatcatccgtgaacgttttctttcactgctttttcaatccgatccaacgcttccacaagcgtcgctctctggcaagccacgttgatccgctcaaaaccacttccaggctctccgaagatcgctcctccatccagccaaacctctgccttatcttctatcagttcttttagttccttgtctgaaagccctaatgcccggaaatccatccagacgagataggttccttctgtctttgtcaccttgatctgtggtaaatgttctgccatccatgtatgaaggaaatcaatattcgacttcacatactgtttcatcgcctgataccattcttcgccctgagtatacgcagcgatcagcgcaaagattccgggtgcgccgacctgactatacccggctgcagttacctgatgctgaaattccttgcgaaggcttgcatttggaatgataatattggaaatctgaagtccagcaagattgaatgtcttccccggggaagtacatgtcactgtaatgtctttatactcgtccttaagatctacaagtacctgatgcttcccttcaaatacgaagtctgcatgaatctcatcacttacaatgatcacctgatgctttaggcaaatgtctcccagacgctccacttcttcccttgtccatacccggctgaccgggttgtgtgggctgcagaataagaataatttcacacccttttccacgatctggcgttcaaaatcttcgaaatcaatcgcataagacccatcttccttacggataaggatattggcggccactttacggtcattgctttcaatcacttcccggaatggataatagaccggatcctggatcagaatataatccccaggttctgtataagccttcaccgccattgccagtgcaaagacaattcccggagtctttgtgatccactccttgtcgattttccatccgtgacggcgttccatccaggagctgaccgcatcgtaatactcctgatctgactctgtatatccataaattccatgctctgcctgacggatcaatgctttctggacgaaagatgacgtcttaaaatccatatcagcgacccacaacggaagaatatctttctttctccctctttcttctgcaaaatcatacttcagactgtgggttcctcttctctctacaggctggtcaaaattcaaattcttctcactcatttttactccttttattgaaatgcctgttccagatccttgatcagatcttcagcattttcaattccaacggacattctaaggaaatcttctgtgattccaagatgttctcttatctccaccggtacatcaccgtgtgtctgaagcattggatatgtgatcaatgattctacaccgccaaggctctccgcataagaaatcaatttcacactttcaagaatctttcttgtacgttccaccgtatctacacggaaagaaagcatacttcctgctcctgtcgcctgcttctggtttacctcgtatcccggatgatcttccagccccggataataaacttctgtcacatccggtctgtttttcagccaaagtgcgattttcttcgcattctcctgctggcgctccagacgcactgataaagttttgattccgcgaagtacaaggaaactgtcaaacggagacagactacagccaactgtcttatatgtataacgcaatttttccgacagctctttccctttgacacaaacaaatcctgcgagaacatcattgtgtcctccaaggaattttgtcccgctatgtactacgatatcagcacccaactgtagcggtttctggaaataaggagaaaggaatgtattatccgcaagaatcagtaacccaaattcgtctgcgagttttctcatctctgcaaaatctgtaatcctcatcgttggattgcttggtgtctcaatataaagtgcctttgtctcttttctgatattctttcttacaagatcaatatctgaagtatctacataagaaaactttaatcctcgcttttcgccaatgctttcaaacattcgcacagttccgccgtacagatcttctgtacataaaatatgatctccttctccgaaaagctccaggcagattccaattgccgccattcctgtcgagcatgcaatactgtcatccgctccttctaaagaggacattacgctttctaattcataccgtgttggattgctctcgcgggaataatcatatcctgtgctttttccgattcccgggtgtgcgaaggttgctgtctgaaaaatgggaacggagactgctccgtatggatgtccctctacaaatcctccgtccccgtgaatacatcgtgtttcaaattgataattttctgccatgctgtctgtctctgctccttacgttccactctattaaatatagtacattccctcaacagaatcctgatacccttcgtatgcatccacaagatccttaagcgtcacatcttccagaatctcctgaacacaatcattgattcggtcaatgatcagatgctgaattgcttcctgatctccacgtcccacgctatttcgatcaacttcatcttccaggtcatacgttccttccagtgcctctacaatctgtgcaaccgtgatttctttcggatctctctcaagaaaatatcctccctgggaacctttcatactctttacaatatgagccttgcgaagagctgaaaatacatgctcaagatactgggcggaaatgtcatttctctgtgcgatactccctaatgaaaccagctctgtccgtgaattcaccgccagatcaataagagcacgcagtccatatctacttttctttgataatttcaaacgcttctactcctttcttctaaacactataggagcagcttttactgctcctacttcttacagatttttctgttttctctgattcttatttactgaattgctttgaatgcctcatccagatcctggatgatatcatcaatattctctgtaccgatggacagacggattgtgtttggcttgattccctgatcgagaagctcttcctccgtgcactggctgtgtgttgttgttgccgggtggataacaagtgatttcacatccgctacatttgcaagcaatgagaacagttccaggttatcaatgaaatcctgagctttcttagaatcacctttgatctcaaatgtgaagatagaaccaccgccgttcgggaaatatttcttataaagttcctgctgcttcggatccggatctacagatggatgatgtactctctcaacctgtggatgattgttcagatactcaacaaccttcagtgcattttccacatgacgctctacacgaagggaaagtgtctcaagtccctgcaggaagataaaggaactgatcggagaaattgttgctcctgtatctctcaaaaggattgctctgatctttgtaacaaatgcagccggtccgcaagcctttgtaaagctgatgccgtggtagcttgggttcggatctgtcagtgacgggaattttcctgaagcctcccagtcgaacttaccgccctcgatgataactccaccgattgttgttccatgtccaccgatgaactttgtagcagagtgaacaacaatgtcagcaccatactcgattggtcttacaagataaggtgttgcaaatgtattatctacaacaagcgggattttatgcttatgtgcgatatttgcgattgcttcaatatcaactacatctgagttcggattaccaagtgtctcgatgtaaacagcttttgtattctcctggattgcattctcaacttcttccagattgaaaatgtcaacaaatgttgttgtaattccataattcggaagtgtatgctcaagaagattgaaagatcctccataaatattctttgcagatacgatgtgatctccctgctgagccaaattctcaattgtatatgtgattgctgctgctccggatgctactgcaagtgctgctgtacctccttcaagcgctgcgattctcttctcaaacacatcctctgtcgggtttgtcagacgtccgtaaatatttcctgcgtctttcagtccaaaacggtctgctgcatgctggctgttgcggaacacataagaagaagtctggtagatcggtactgctcttgcatctgtcaccggatccggctgctcctggcctacgtgaagctgtaatgtctcaaatttaaattttctgtcttttctctctaattttgccatgggtttattctcctttttctaattcctgttttgtattcttattccgcagccagagctgcttggaagttaaaatcttacttaattaatgccttgcggttgtcttgatattcgtgcctactctgtaaagagtggtgtagagtagtatctgtctccgctgtccggaagaagtgctacgattgtcttgcccttgttctccggtttctttgcatatgcaattgctccggaaagtgctgctcctgaagaaatacctaccaggattccttctgtctttgcaagaagcttcgcggctgcgaatccttcgtcattgtctgctttgtatatctcgtcatagatctttgtattaaggacatccggtacgaatcctgctccgattccctgaatcttgtgcggtccgccctttccttctgaaagtaccggggatgctgcaggctcaagtgctacaaccttcacatccggtttctgggacttcagatattcaccaacacctgtcagtgttccacctgtaccgacaccggcgataaagatatcaacatttccatctgtgtctttccagatctccgggcctgttgtctctctgtgtgcttttgagttcgccggattaacgaactgtcccgggataaagctgttcgggatttcctttgcaagctcttcagcttttgcaattgctcctttcattccctttgtaccttctgtaagtacgatctctgctccatatgctttgaggatatttcttcgctcaacactcatggtctctggcatggtaagaattgctctgtaccccttcgctgctgcgattgatgcaagtccgattcctgtgtttccggaagtaggttcgatgataacagaaccttctttcaggattcctttctcttctgcatcttcgatcattgccttcgcaacacgatctttcacacttcctgccggattaagatactcaagctttacaagaatcgttgcttcaagtccaagctctttttccagattcacaggttcaacaagtggtgtgtttccaatcagtccaagtgtgcctttataaattgccgccatagtctatatcctcactttctttattaacctacttagttggtgtgtttttgatggtttgtattatatacttataaaacccatctgtcaactatgttttaatatttttctacattttttattatacaatatcgatcggagatgtaaataatcaaaaaatattctcctttcggagtttattttttattttcaaaaaaagattcccatttgggaatctttttctatgtcgtctctcgctcaatcagtttcgtaccgaacaccatgtgctgtacgcttggtttctcatcatctgccgcctcaatatcttctaatatcatatccgctgcccgctgtcccatctcgcgacccggcagctccatagaagtcatggctgtctcaagcattcctccgattacatgaccggtaaggctgatgaccttgacctcctccggcactttctttccgctctctttcagtgcccggagtactccgattccctgcatatccgcagcgaccatgattccatctacgtcatcaaatgcctctttgagccgctctacgcctttataaccatctttgaaataatttccacgcggcagtccggactcaacctgatactccttcaggctgagttctttcattgctttatgatatcctctgtaacgttccgcatatggtgtaaactctgtcgatccgttgataaaaccaatctttgtacaccctttcttataaagatactttgccgcttcatatccgcaggagaagcagtcagcttctaccgaactgaattttctgtcctggtttctgacaagctgcacgactgctactccatttgccttgatatcacgaatcaatcttgtgttctgtccggtcgatgcgatcaggattccgtctaccagtccattgcgcagacggttcagacactctgcttcaatatctgggtcatccttcgtcaaacagatcatcagactgtaacccctattgcctgcctgcatctcgatcccctggacgatctcaccaaaaatagaaagattcacagatggtacaactactccaagcgtccgtctcttcccctgtttcaaacctttcgccagcagatttgggcgatagcttaactgctctaccgccttaaatattttctttttcgtatccggatgaacatacgacgtattgttcaatgctctagataccgtactcacatctacgttcgcaagctttgcaacatcctttaatgtagccataacatctcttcctcctgtgcatctgttctgtctcgtacaattaattatcactcttcctattataacatgccacaaaagcctggcaaccatctcgttatgataatcaccagacttttcgttcttatctataagaccgtagaagcggacacatacttcctgatctttatgaaaatgaagcaatcagcttcggaatataatttgcaagtgcagagactgtcattgctaatgtaaagagataactgactgtcataagaacctgcagtactcttggtgccttcaatccagcctgaacttctttcttccagaacatcaatgtgatgaaaagacctgcaaccggagttgcgattgatgttgcgatgttagcaatgaagatcagctgtgtcggagaaccgtcgtagatgaagcagactacacatgcaaatgcaagtgtgatcatacatccccagcggatcagcttggactcaagtgcaacgtctttgtcgaatcctgcacttaaaagtaccatacctctctgcgtattaccgagaagtgaagagaatcctgctccgagaagtgcaactcccattacaatgttagaagcttttccaaggaaaggaacaagaagcgctgccaactgtgccggtgctttaatctgaattccctgtggattcagaacgattgctccaaccagcatgattgctccggaaatcaggataactgatacaatatgtgcgattgcatcccatttcattgctccgttaaataaatcctcttttttccactttttctcagcaccgagatatgttccatagattcctgctgtcacagctgcatttgtactgatataagcaagtgctgttgtaagacttccttccggtacactccagtgtgttaatccatgtcccattgcaccccagtcaggtccgccggttgcaatcagtgttgcatagaaagcaaatatcatagcaatgatacaaactaaaattcctttttctacttttgaataaacaccttttgaaaagtaaagcactgtaagtactgccaacatgatcagtgctcctaatttccagttgattccaaatacaaggttcatacctgcacctgttccggaaatatttccaagtgtaaagaacaggcaggataagaataatgcaacaccacagaatccagatgcaacttttccataataatgtctgatcgcatgtaagattggcattcctgtcaacatagaaatacggtaggatgtcagcatgaatgtaacacccatgatcaggatcggtataatcagccagaccaggctgtatccataattcgcaccaatcattgcagatgttgtaatattaccaggtcctattactactccggtaaggacaattccaggacctacacgttttaaaatttcttttgcagaaagcttgttgacttttgatggatcaaatccatctattcccagatttttgttattttctgtcatggctcctccgttctaagagtgatgtctgaaacatgattttttcgtatatatttcagacaccacatctatagttatatcataattttcgtcttatttatcttcgaactgagtcatatcaacttccggaagctggcttctctcaagtccaagagctacccagtctttttcttcctgattcagcggaagaaccggttttctcataagtgctgaagagaagattcctctctgtttcagagcttctttcagtcttgcatgcgcttcacctgatggctgtccgcctccgtagattgcctgggaaatgtggtagatacgatctgaccaatcctgagcttcttttaatgtatgtttgtctgggttagcaaatacttctcttgccgggcagatgatctccggtacgcatcctgcgaatccaatcagagctccgtccattcccgggaaccagcttacgcacagtgtctcatcatgacatgtgataagagagatgtctgggcactcctgacgaagaagacgtacgtcatgctcatagatagatgtaacacgtgttcccatcttgatacattttacatgatcgatctctttgcacattttgatcagtgtctctaccgggtagaaagctttgcttgttgccgggtacaggtggatgatgatgtcgatgtcagctccctctgcaacatcttttacatactcgaacggtgcatccgggttcataccgaatctcagccacatatgtggtggcataagaaggattccgtcagctcctgcttccttagcttcttttgccatctcgatagactctgctgtgttctcacagttaacaccggagatgattgtcataacgtctccacactcttctgcacagatctctacaacacgttttctctctgctcttgtaagccctgtaatctctcctgtatgtccgttacatacaagtccgtccattccttttccgtagaatgttttgatccatcttaagtatgctctgaattctggttcgttgatagaataatcgtcattaagcggtacagatactgctgggaaaattgtcttgaatgtttttacttttgccatttttattgtctcctttttcttccgaatctcattattatcaattgccagaactttgcgcattgttcatttttcatattacaaacgtttgttgtttgctatgtttaggttatatcacacaatgcaacacccagtcaacgaatcagacctctcctgcaatttgttgcataaatccaattcatctgccattttcatgcaatttattgtgtatttacacaacaaaccgcataaagactaaaaaattagtttaaaaagataattttaacgaaaaaggcaaaaaggaagctgccgcttcgcaattttattgttaaagcggcagcctcctctaaaaggcatattttatcttataataacatggcagaattattgcagtatgtttcttagtcttcgaactgtgtcatgtctacttccggaagctggcttctctcaagaccgagagctacccatgctttctcttcatcgttcagcggaagaactggttttctcataagtgctgaagagaagattcctctctgtttcagagcttctttcagtcttgcatgagcttcacctgatggctgtccgcctccataaattgcctgggaaatgtggtagatacgatctgaccaatcctgagcttcttttaatgtatgtttgtctgggttcgcaaatacttctcttgccgggcagatgatctccggtacgcatcctgcgaatccaatcagagctccgtccattcccgggaaccagcttacgcacagtgtctcatcatgacatgtgataagagagatgtctgggcactcctgacgaagaagacgtacgtcatgctcatagatagatgtaacacgtgttcccatcttgatacattttacatgatcgatctctttgcacattttgatcagtgtctctaccgggtagaaagctttgcttgttgccgggtacaggtggatgatgatgtcgatgtcagctccctctgcaacatcttttacatactcgaacggtgcatccgggttcataccgaatctcagccacatatgtggtggcataagaaggattccgtcagctcctgcttccttcgcttcttttgccatctcgatagactctgctgtgttctcacagttaacaccggagatgattgtcataacgtctccacactcttctgcacagatctctacaacacgttttctctctgctcttgtaagtcctgtgatctctcctgtatgtccgttacatacaagtccgtccattccttttccgtagaatgttttgatccatcttaagtatgctctgaattctggttcgttgatagaatagtcatcgttaagcggtactgatactgcagggaaaattgtcttgaatgtttttacttttgccatttttattgtctcctttttcttgtatgagataacatgatttttaatgtttcctaacaatgcgcattgttcatttctttctatgcaaacgtttgttgtttgctatgattaggttatatcacacaaaaaagagacggtcaataaaataaccgtctcctgcaatttgttgcataaatcaggaaaataatggggttaactgcaataattttcgcattatatgtgttactttttatgttgatttttctcaacatatttgttatcgcatgttcaggctttatgcctggggtgctacttcacattgacgtgaatggcggttcgctttgcgcggagagtttatagctccgattacatagatcatctctcatttgagaaatcttggagaggagaattggcctatgctgaccattactgaccttattgcagtgttttcactgtgtgcgactttttatagtcttggttacgtgcgtggaaagcatgattccaagacgcaaaaataaccgcccagcctgagaaactctgcggttatttttaaccctataaaatatcaggcgaaccgtcatcggtagcacctttctatttattagactagcatttcttttttcttatgtcaaacaaatcttttactcctcgttaccgctcacacgatgtgcgaccggaaacctcgcaccgcaccgtcactctgttctttccatccagcgtacaagtgaacaagctcaacgcccattctccgcttgtcatatcttccacgctttgtggagtcagtgcctctaccgccgccactttgtattcgaaccgattcccggctgcatctgtgaagatcacctcatcacctgtctcaagttctttcaactttccgaaatgtgttctataattatgtgctgcgatcacaaggttatccagataagcacttcctgaataacggcaaggtgccttcttcagaagcggatagctccattcgctcaataccggaagcttcaggtcgatctttggtatctcaagcactccgatgcacgccgcgccgtccagatcttctaatgcgatctccggcatctccatctccggattcagctggtaatccggtatctgttcgtcagattcttctgcctgctctccctcatcagaaatgttctggttcttgtctctatattcttccaatagctcctctctgctttgctctgcccgataaccatcccagagattgtatacagaaagagcaagggctgccgcgaaaagcagcaaccctgtgattgtaaatatctttcctatctgattctttttcttcttgctcatcgattcttctcttcttttctatcccgtaaaactcttcccaccagcagacagatcgcacctgcaaacaaaagcacaagtaccggccaccagagctgtcctgtctgtggaagcttgtctgatgttttgtctgttgttttatttactgttttatccgtcggcttcttcgatggtggattcacttctccgtcaggatttcctgacttctttgctgtattcgtcaagacaactgtatccccttcacgcgtaacagcaactgtatacccattcggcacctctgcctctgacacactccagcgcatcaacgtggaaagattcttccatgtataggaccactggttttctttcgtaagtgtctgacggtcaacgactgttgtattcccctccacatccgtctgcagcagttctaccacgatagaatccgggcgttctttctcctgatcctgcttccacactttcaatacatgaatcttcgtctcttctggatttcccggtttgtcgttcttctcgaacttcagaaccgctgtcacctgataaggatctgtcccttctgaagtttcctttgaatcctccggcaatgcgatcaatgctgtctgtggctcatagatctgtgtcttgccgtcttcctgcagctctgttgtctgtcccagcacaagataaagtccccagttaagatctgtaaaacatacggttctgtccgaccctgatatgagtactgcatctgctgtgattccatcacgtctgatatagtccgccagcgcatccgctgtcccctgccagccctcctggctcttctgctccagtgagaccggatacttctggaattgttccgtcaatgtaaaactgcccgactcctcatactctgccacacggtacagagacagctccatcccctcaaccgggcagacgagcgagatgctccccttctgcgtactctcttcttccgctgccagaaccggattgccctttgagattccgagtatcccggtcagcgcaatgagaaatgtcaacacatatatcatataattcctgtctctgtggcggattcttttctttggacttcgcatgttctccctcccactgatcaatttatctgttactgttcacacgatgtgcgaccagcaacgcatctcgccattttaaatcgcctttggcgatggggcgagatgcattcaagtcaaaacacgcatcctccgtgtcaatcagcggagtgattgacacgggagtgaacagtaacatttatcttcctctactttttctgtttctttcttgaacgccggattgatagatccactacaagaaaactaatgattaaaagcggaatcgcaacacataccgcaactgtcaaactgcttacctcagccgcatccgatgtcactctggagtcatctcccgaacgattttcaatccgatgtccgcgcaccaaaagtctctgcgtattgattccatatggtgtacatgtaagaagcgtacacagatcctttccatcttcaatctcaagcaggccataatcttccggctcgacaatactgatctggtcaatctcatacgtcaataccttatcataaatgtgtagaagaaagatatctcccttttccaacttatcaaggtctgtgaacaacttcgcactcggcagtcctctgtgcccggataatacacagtgcgtgccccttcctccaaccggaagagacgaaccttcaatatgcccgataccaacctgcagaacagaatcctctacaccatgatatatcggaagcttacagcgaatctctgggattgtgatatatcccatcattccggttccatttgcatccagaagactatcatataaagtatcttcctcttctgatggtgtaaagcgtcctccattcgtaatcaacgtctggttgtactcctctgccgccgccagcgcctgctccttctcctgatcatccatcttctctatctgcttcgaataatccgcaaccgcctgcgtctgatgcttcgaattccagaaattactaattgtcggatacagcagtaaggacaagcctgtaagaaagatgattcccgcaattattgttgaaatatgctttctcatgttacaatcctctccttgctgctgtatggggaatgatgaaacacattccccgtacagcaaaattacttctttcttatctcacttacatacctataatcgagcaacaattatttcattctcttctttgtaatcagtacaactccagatccaattacaaggattgcaccgaaaatatagaacaaggttgttcccattccacctgtggatgggaggagggaaccggatttgttttcgacttctacttggtcaactgttttatctccaatggtaatttttccgtccgccgcaatgactatctttacaggatttgacagcttgttgtatccatctggctgttttgtctctgtgagatagtatgtgtcagcatcaagtcctatgattgtaaaactaccattttcaggggttgtcacttttgttatctttgtaattcccgctgcttctgtttcctttgccacacggtaaatatcctcagtttctgtaatttttactaattcaattggattttccccatttgaatttttactcaacgtaaaaattgcacctgcaagtccttcatttgttccgttcttctttgtatatttgaatactggaattttatatgtttttgttattgtttttgaagaaattgtatttttatctccatactctaactttgcctcattggtatttcctgtttctccaattactgcattctcatttaatgttgcggaataggtaacgataattgtatcgttcgcatttaatttatcacagaattcctgtgcgaaaacgatttcaaatgtgcaaccatctgtaatatttgcatttaatgtataatttgatgtatctacaactgatccgtttttctttacatttatatcattattaaatgttaaccctttatccatcttatcatgcaacacatagttctgtgctcctgcttgtgcagtaattgttgtctggaagtttactgtctgaccaatatctgctgtgttatccttgtcccaatgatcatcagaatcttcctgtacctttttctccactgaaggcacaccattcttttcttgaatttccacctctttagctgtggtattaagagagcaaagagctccaacactagaatcaacaagataatatccaagtgaaaggccctcaaatgttaccgttgaagtagtgcttccctctgtagcatctggagcatttgcagatttttctgctactattgaatttgttgggtcttttgcataagccaatgccgcttttgcgaacgctacaggatctgcattttccacccatgtaacatatccgctaccatctgtttttaaatatgtctctcctgtttctgactcaacaaaccccttccacttagttgttgctttataagcatagtttcctggattttctgctgttttatcactaaaactctccagttccaaaatctgataaattgtatatttctgctttggcacagcattcgtaattgttatctttccatccttcgttgctgacgtttcactcgtcccctcagctcctaccacactacacattcccaataccatcataaccgagagcattatggcggcaatcttcttgattattttcattttcttcctccttatttttgttactgcccccggaattttccgggggtgcagcacactctcttttgttagtttcttgtttttgtttctttatatttcatcagcataagcactcctgcgaagagtattaatatcacccctgccaatctgtaaataagaaccccacaactgcctgtggaaggcagtttattcacacggctttgatttgtaacggttaccgtgtcaccgttggttgcactgttcgactctgttgcgccagtctttgttgtcgtatatgacgtaaagtattccattccgttcacaatagcaactgtagaagaatcttttattggctgattcttatcatcaagttcaaatacgtaataggtcgttttcgtatccagatcaacaaatttattcttgtttgtccccgtttctccggcactatacgtgattggtattttctgaatcggagtacctgttgcattttcatctccataaaggccaacccaatacgttccactcactggatttgaatcatgaccacccggattcttaaactttttctctacggtaatctcacctttatgattactaatggtcaattcatatattggctgatactgtatgttaatcttaggatctgctatacagcttttcacataatccgagtaatccgctgctccatcctctttctttggaaccataatataatgtggggtatcatctttaacatatccatttggtgctgttacttccatcacctgataaagcgtattatagtccattgctggatcatcggatgttccagcaccaaattgaatttctccgtttgaatcagttgttttattctcccaattcttatcattgtctacctttatcgttccgtcatcgtttttcgtacatttcttcagttggaatacagcaccttgtaatccaagagacaggttgttctgatctttcttgataattttcaaccagatattctttccacttccgaccgttcctcctgcagtgtatgaataatttttctgatctacacttgtcccactggacggagtataagtttcccaatatgccttatttgaaaaattcacgctttgtctaggcggtgcattaacccttgctgtgtaggtaattgtaatcggtacattacaaggaatctcaattgtcaacgtattgtcttctccaagtgaagctttgaaagcaactggtttactgtcttttgaattaaccaccttaatcgttgttgtatccaagatcaaagtagaactcattttatcaatcagtttcagagttgttccttctaccgttggaagcgtctgtcccaactgatttgccttgattataaagtttactttttcgcttaccggattggttgcagccattgacttatcaattttctgtgctgttatatcagctggagaggttgctgtattaatatcctggccatctgttgtctgaagtgtaacctgatttgtaaatctctttgtttctcctcccaacagcacttttggatctgtcaccttgcatacgacctgaacatccacggaataatcatccctgatttttccatttacaaaatctcccagctcgattaatgccttgttatctttgacataataagttgttgtttcacttctgttgttatctgtacctgctgtaaccgttttctttttccatccatcactctcaagattcgtaacttcctttgattcaattgttccctgctttgttccggtccatttaatacggatatatgcaagttccatcccatctggaatcgtctctaacacacgataggttcctgacaattcaccggcatagttcaacttgaatacccaggaagcatactgccctgccccaggcaatgcatcttttgctatttttcccgagtctccttcatcccggccatcatttttacttattacagtagttccatcataggtaaagctctgtccaaactcttttaagatatctccggctccacaaagcagttcgtttgcttctccctgtttgatccaagttttaccattatcactcgtactgatactgtttctatatgtattataatccctatcttttactggcaacgctgccggttccgttcttacaatgatataaagtttctcctgcccaagcgcaatctgctcttttgcctttacttgtaatttgctttcattctgaccagatttctcaaatttctctgtgacatcagtaaggtttccgttatcctgcagatccttcaagctactataacctgtaagtgtctttccctctggtaacgtacctttataaattcctgccagcgaatccgtttttaaaatcgaatttgtcagatcagatccgcttacaatagaatctttgaaatatgtgccttctttaatcgctgttccagaaacttcaatcgcccagtaaatttttccttttgtccattctgtcgcactagcttctggtttctcataataccaggattctttgtttacattcatcctgtactcaccagagattgttacctctttttgagaattaatgcctgtaatatcaaacttctgacctcctctgataacctcccctgataactcgaatttattatttacgatagctgtgctaaatgtacccgtatttaccggctttgcataatatgtaaatctatatgcataattctgtccgctccatcctaaatctgatggtttcaattcaaaggtctttaatccgtcaatcttcacccacttagttccttgtaactcatatgctttcgttgttgtatcataactatatgcttctactttcgcatatcctgtatactgcatcttatcagaatctagtgtatccttcattaatacattcgtcgcatcccagtctcctaacgtctggttgacatcaactgtataaggataacttcctgccgggacagtaaaactggcgcccgctgaagtatctaacagaatctctccacttgtcagatcgtatttatcgccggtcatttcgattgtctgatcagctgttgttccagttccaactactttctcgtcccatttgtaaccaccgacattattattactgttgtatgcattaaacccagttacaaattgactatatacattagatgctgatgcaatccaacgatttttcacagatacattatctgattttaccgccgctaatgcctctggcttcaccttaacactatacgttacataataggagtcgccaagattcacttgaatcggtttaccttcctttccggaaattttaaaactatttggatttccatccgaagaatctgaccactctgttttatacgtactcatgtctgttgaccagctggtattatattcagttttaggaatctcattgtagtcagtcgccccatccgttttcacaagcacacgaaccgaagtacgatcataactgatatatggaagtgcttttgaatctgttgcattactactgtgtttcagataatcttgaaacacaaaattttccaatggataattactatttgttttatccaatgaaaaatgaagctcataattaatgatgtaagatccatccgtgttcttttcaatatttcccactcggcttttcggcatggtgtaagaaatcttcggtgtaaatgttgcatcatcatataccctcttatatgtctttgagtatacatttgcctgatttttaatttccttattgtccaaagcaacatcatctttcaacttcacatagtatgtaagtgtccgtctttcatttggtgccatatcaccaatcttccagaccaagcttccaggttctgtaatacttgtttctccttctgtcggaataggcttttctgcagtcggtgcatttcctttgtaaattttcccagaattcttagcagaaccaatcgtttcatatggtttttgttcatttgaagttgccgcaagctccgtcgcatttgatgtaattcctacataagtaacacaatcagaattacttatcaaactatctactactgaaacgtccgggcatccgtcctcccctgctgtaactgtaatagtataagaaagaaaatttccttctgttgttgaaatagccttctcacttgtgcagttcttctgtacactaacctttccgtacttcgcaattgcatcttgtccaaaatccaacttatatgttttcccagcagttgtcagtgtttttttgccatctttgtccaattgactcagattcacctctcctgtaatatagaaatctccttcaattgttgtaactccttcgttatttttcttctcaagatagttttgatcaaattgtactttgattttcccctcacttatagaaagtgttccaacaatctccgatccttccataatgtttccacctggtgtcgcattacgtaaaagatctggaagatcatatgtcaatgtacagttatggttttgaatcagtttttgtatctgtatctccttatactcaacttccaatttgatgtttgcatcacctggaatttcttcgcttccgttttcttcaattttcttccagttttcatctttttcttgataatacagtgaaactgattccacctttgatgcatacttactcagatcaaacccttccgtcgccgtcgtagtacctcccgttccgtcttcgccctctgctgctggtgctgatgtactccctgccacgacactttcttcatcattgccagatgtctcatccgctgtggttcctgctgtatctccattttctccgttctgagctacattccaatcacccgatgtctgaacctgatcctgactttgactctgatcctggctctgattttgattctgttcctgactttgtcccgaattctgctcctgtccttctgtctggttctgctccggtgtctgctgtggatcttcccctgattgatcttccaatgtcttatcatctgcataacacgattcggtatgtgtgtgttctgtttttccgcaagtcagctgtccgtcacttgaatagcattcttctgtatggctatgctcttcctgaccacagactgtctttctctccagcgtgattgccgggagaatcagcgcatagaccgtacagaaaacaactacacaggacagacacagaatcatctttctccaccgttttaaccgggttttgtcttttaataatcttctgatataatccgttcctttattctgcacaaatccaccttcttttttctggtgtgtatctgctgccttcttgtgttagtcttcccttcgataccttatatactaaactaattatttattatttgtaactgttcagagccaagcaaaatttcaaaaaaggtttaaaatgcttgcattttttagaccgtttttgaaattttatttggcggatacgccacacctccgaaatgcgtagcattttggaggttggctctgaacagttactattatttcactgtatgcttcctattttattcaacggccagattcgaaatatgatctgtccttctatctggtcttttgaaatatcaccgatcgcggtgcttcttgaatcaaccgatgtatctctgttatctcccatcagaaaccaatgtgcttctgatacctgatgtgggagatcaatatcgcaatttccaagcgctttttctgtcagatacggttcgtccagtgtctgtccgtcaaccgtcacatttccgtccatatcaatatcaacccactgtcccggacctgcgatcacgcgcttgatcaggagcttattcccctgccagaatgcaacaatttctcctgtcttcagctgactggtcttcactgatactacaatctgcccggcttccaatgtcggtgacatggaagaaccgtaaatctgcagaaccggcatccacagggttgccacaagaacagagattgccgcaactacaagcagcactgcgatcgtaccgcggagtgttctttgatataccgcccggtgtctcagcctcttctgttcgttctcaacttcttctattgtagggatattaactgaatgttctttcttcttcactactctaatctcgcatattcttcttggcctgctttgtcaggcgtgccaattctttttcctttgcttttatcgatttaagatagctatcagcagcttcctgtgccgcctggaatacgccacttagctgtactgccgcatcagcgatcgatcccgccttctctatcgtgatctctctggcctgaagctttgcctctgcctcatccagcctggtctgaagctctatctcccgcttcttcatctcatagatcaaatcgatcaattcgcttcttcttagatgcttcaaatcgttcttcatacatcattgactcctttgtcttgatttcctgtttctcttcatgaaacggttcgttcaaatctaagactttagtcttctttttacgtcaagcagattatagtacacagatattctatctgtcaattgcattttagtaatttttacctattttctcgagtttttttatcattttttcgtattttagacgcattattatgttttgtctagaaatagattatgtattttgtattattttttccttttattctccttatcctgtatttctattcagctatcagcactgccactctgagttatattataaattttctacttttgtaaaggtgaaacgtttcgcctttacaaaaaagaaagaccaccgagaacggtttcaaaactctgctccattctcagcggtcaatcttcataaagtcaatattaaaattcagcgatcactgtctcgccctgtactgcgtccattcctgtatgcagcttcatatccggataatcgtctccgtttgtaactacgagaatacatgttttctcatatccgtgttctttgattttctccggatcaaatgaaagcagcttgtctcctgcgtttaccttatctccttcttttacgaagtactcgaatccgtcaccttccatgttcacagtgtcgattccttcatggatcaaaatctctactccgttcgcaagtgtaagtccgactgcgtgtctggagccttccatcagcacagatactgttgcgtcacatggcgccacgatcacattctcttctggctcgattgcaagtccgtcacctaatgctttagatgagaacacctcgtcttttacttcctcgattggtactacttttcctgacagataagcctttacaacgaatggcttattctcttctgcaggagcctgttttttcttgaaaaatgaaaacatacctacttctcgcctctcttttcttttaagcattgtatattggttctaatttccccaaccaatgtatctcttaaaagtataacccagaagtacttttcagtcaatgaatacctaggtttctgtatcctatgtatcctatgtttctgtatcctactgcgtcctacaatcccgccagatccacctcatagataaatctctccggttctttctccggctgataaaacatactcagataccaagggtaatactcgattccttccttctccatcacatttcctttacagaatacaatctttcttccaaaatcccagttctctacagcagacactttattcaatgccgaatgtttctgataatcatttcctgattttatttccagaagatctactttcattccattttgaatcacgaaatccaattctccatattttttagactcaaaataatttaaagagaatccatttgcttttattatctgggcaaatacattttccaaaatgcttcccatatttacttccatatttccctgtaagagttcaaattgaatattctccatacaggaagcacacagaagtcctgtatctcccatgaatagcttgaacagatttcgtttctcgttaagctgcagaggcggctgcggctctgtcacattatatgatggaagtgcaacgcctgcgtcactcagccaaaggaatgcattctcataccggttcattcttccattttcatcaatccgattcaggaaaaatcgcctgttcttatcatctaactgtaaagcaatactgtcaaagattgctttgatttttatcttttctgtgctttccgaatattttgatatatcctgtctgtataattccaggatgcttctctgaagttgtattacttttccaacatcatgtgtagttacataagtttgtacaacatccggcattccccccacaacaatataggttgaaaacagcttcaacaaagtttcatgcatcacctttggaaccgcttcatgtttttcataacaggtctgtaacgtttttaacgtagattcctgtactccattcgctgtaagatattctttgaaattcatcggatacatatatacgatttcttcaaatcctaccgcataagatggaacttccttgtatcgaactcccagaagagatcctgattctatataatcaaatctaccgtcttccacaaggaattttattgcacatcttgcattcggacattcctgtatctcatcgaggaaaatcagagtcttccccggttctaatttctgcatcttaaacgctgtgagattctcaataatcgtattcgcatctaatttgccttcaaagattttttctgcccctttgtctaagatgaaatttatttcaacaaagtattcgtactgctctttcgcaaactctcggataatcgttgtctttccgatctgtcttgctccaatgatacaaagtgctttctttttcttctgattcttccacgaaattaatttctctgagatttctctttttaacattgttccaacctcctgatattagtattgtaacatttttccaaggttattcaatgtgtttcgttacttttttccatgtttttcacctgttcttgtaacatttttccgcattttttaccatgttttgtaacattattctcgcgtcccgatcagaattttctttccttcaaatgcaaatccgtaatgtcgaatctcttcttttttgaatccacgtgcaaaaagtgtctatatcagaaccttttatcgtttcttgatatagacactcttttttaacaatcatcctgtcatctaattaatattttcaccgttggttgaaataacttctttataccactcgaaagaatctttctttcttctggacaagtctcctgttccatcgttatgtttatccacatagatgaatccatatctcttatccatctcaccgcttcctgcactgacaaggtcgatgcatccccatggtgtataacccatcagatctacaccatcttcctctaccgcctttttcatttctgaaatgtggtgctgcagatattctacacggtatggatcgtggatgcttccatcctcttctaaagtatcatatgctccaaatccattttctacaataaacaatggtactttgtagcgatctgtaaaccagttcaatgaatagcgcagtccaatcggatcaatctgccatccccattcacttgcctttacatactggttctttatacgatccttttctccacggtaatcatattccggattgtccggttctgcttttgtacagaaagacatataataactgaaaccgatataatcgacacagccctgttttaacactgcaagatcttcttctgttacgtcaatcttaaggtcttttctttcccagtatttcaaaatatttacagggtattctccttttacatgcacatctgtataataatatcttttctgcatggctttttcagcctgcagtatatcttccggacggcaggtagccggataaatcgggcacattgcgatcatgcagccaatctgaaattccggattgatcttatgtcctgcttttatcgcttcggcactggcaaccagttcgtagtgagatgcctgatacatcaattcttctacattttcttctggtttaactacaatcccggaatcagcgtaaagcatgaatccgtcaccgatatctgcctggttgttaatctcattaaatgtcatccaatattttactttgtctttgtatcgctcaaagcatgttactgcaaatttcacgaagaaatcaatcagttttctgtttctccatccaccgtactcttgtacaagatgcagaggcatctcaaaatgactcagtgtgatcactggttcgatcccatatttcagacactcatcaaacatgtcatcatagaactttaatccggcttcattcggctgttcttcatcgccatttgggaagatacgtgtccatgcaatacttgtacggaaacacttgaatcccatttccgcaaataagtggatatcttctttatagtaatcataaaaatcgattgcttcatgattcggataattctcgccttttagtatttcacctgttattcttcttcttctatttacatctccgctggttacaacgtccataatgctcaagccttttccatctcgatcataggcaccctccagctgatgagcagaaactgcgccgccccagagaaaatcttttcgaaatcccattgttatttccttcctgttgtctttattaatttggtaactgttcagagccaagcaaaatttcaaaaaaagatgtaaaatgcttgcatttttaaaactgtttttgaaattttatttggcggatacgccacactttcaaaatgcgtagcattttgaaggttggctctgaacagttacatgatttgtataatagtgttgggggcttttgcccccaacttttctgtttctatattcaattacatcttgatgattatttctcatcaattctcttatacagtgcaatgaattcatctgcgagaatacggaaactctctgcactcataagctgatcttctgcatgcatcagaagcatgtatccattagaaatctctccatttgcatccattgtcagaaggtctgcatgagcgttatgcccaagtgaaaaggcttcatctccttgtttgatcagctctgctgcctcatcgtattttccctctttcgcacaatggattgcattgataaaatgtgttcttgctgtacctacatatgtaataatctgaaaacatgccaattcaaatttttcgtccatttttgtctcctgtcctgcttttattatttttaaattctgattttaccagtcttcatcctcatcttctactggctgattcttctcctgaaccagattcatcttgtcaaccttcttaatgaatggcagataaacaaagaatgaaacacaaaggattactaactgaagcaaatcacttttccatcctgctaaaaggaatcctgagataatcggtggacaagtccatggaatctgtgttgctccatataatgggcagattcctgtatacagtgcaaaatactggattaaacatgcaatcacaggcattccaataaacggaattgcaagcattgggttcataacgatcggagtaccaaacagaactggctcattgattccaaatattgccggaataattcccactttaccaagtgctttcaactgttttgattttgcaaagaagaacatatacattacaagtccgattgtgatacctgcacctgttatattgataaactgatcataaaactgctgtgttacaatatggcctccgtttgctattgtaagttctacaccactgtcaataatagcctggtttgcaaggctgtttgcctgtaaaagtcctgtcatgattccaccaactactgttgaaccatgaactccgaagaagcacaggaatggtcctgtaaagcacatcagaactgctccaccaagggagtctgtcattttctgaagtggtgtctgaacaactttgtaaataatttccatacctgttgtgttgaatccaatagaacagataccgtgaattactgcagtccctgtcaggattacgaatgccgggattaatgctgagaatgcatttgttacaccttccggaactccggccggcattttaatacgtatatttttcttcaagaaccaacagtaaacaagcggtacgatcaatccgacaatgattgctccaatcattccctgtcctgctgtccatgtcttatcaatgattccaccaacaacttctccactttctgttgttttggacgaaggcatcagaatcaagaatgatgccaatgaaataattgcacagttgagtggttcctgattttccagtttcgcatagctatagctgataccgataactgcgatcatcgcactgatggagaatgttgcgccacatgcctgatctaatactgctttgattcctgtagactctaatacatcgacaactgcctttaccggaaagtttgacaggatcaggaagattgatccgatgatcagaggagacatggaagtcaccataccattttttattgactgtattccctttgtattaataaacttaaggatcacagggattactttttcgttaaatttctctttcatttgctactaccctttactttaaattgtgtatctttgttttctcttatttatttttcgcaagcttatatgcaaatttcaaaacattcattccattgcacattccataatcctgcattgggatcacatctaccggaaccccttttggatcacagatctcttttgctctggcaagctgatatcctacctgtggtccgagcagtgctacatccgcgccttcaatcatgcgttccatatctgtaaatggatatgctgcgatgtcagcatcttttcctttttcctttgctgcctcttccatcttttttaccaaaagacttgttgacattcctgctgcacaaaataatcgaattaccatgattgtttcctccctaattttttctcatttgttttgatggtgctagtataacaggcattttccattttgtcagtactttttcctgtttctggtttccgttccatatagacggaatttgttacataaaaaaaacagggcattctactttattgtgtaaaatgcactgttttcactttccttttttgtatattatgatactttttcttgtatcctgttttttttgttacttatctggttactattcgtaccattacattctacaaccttaatgaaataagtcttccatatcattttgaaacagatcatctgtatcgttatggacgccctccaattctcttccgattaattccaaaataaaaacgactgccatttgggatgtcagatcataattttcgtcttttttatactctgaaacataataatttatattgcagtcactcatcttcgccaaagaacagtttgccttatttgtaatagatatcaggctgctccctcttcttttcaacttttctgccaacatcagtgtctgttccgtctctcctgatacagacaatgcgattgtagctgttctctcaccttttccacgaaatactggcgtgaacggatcatcaatagcaaatgaaaaccagcctacattattaaaatatcttgccccatactttcctataatagaagaatttcccacacctacaaatataattgacgatgcctttgtaagcaacttcacagcttcctagatattctcagcaaatgcctgtgtctgcaccctctcaaagaaatctttaaccgcagtaagatccatattgattttcttctgttctttgctgttgacttcctgttttaatttcaaacggaattcagaatatccctcgcatcctacctttttacaaaagcgaaggatcgttgttgtcgaaacatgaacctcctctgccagttcacgtactttcatatatactactttctcttcattgccgataatgtaattatatacatccatctccaactgattaaacgactttatcatctcatgcgtaaacatatgaattcagttcctttctattttttctctctattccattcttctgatcattcactcaacagctgacttgcttccttccagcactgccgtcctgctgccaggatggaacacggctgatccaacgtgatcattccgccctctgctgttgagataaatcctcctgcttccatcacgatcagtgatgctgccgcataatcccacggatacagcattagttcaagatagactccatttgcgccggatgccacacggcagatatcaagcgctgcagaaccacctgcacgaattccaaggctgttcagatacagcttcttcgcatggtcaaagattctgtctgtatcttctgtctgataccgtgcagttccgaatgcaaccagattatctgcaagtcctttatccgaacagtgaatctcttttccgttcagcttcgccccttcgcctttcacagcggaatacatttctcttgtgtaagggttgtaaacacagccaaacagcattcttccaaactttgtcagaccgactgagatacaactgtgcttgtaatcaaagataaagttcgtcgttccgtcaatcggatctataatgaaacaatagccatctccaagttcctgctgcatcccgtcttcctctgcaagaaatgtcgcttccggtatgagttgacgcaaattctggatcagataaaactgaatctccttgtcatgctttgtcacaaagtttgcagttccttctttatcaaaaactgtcagttcctcgtcctgtgcctgaagcatcagttcccctgccagtgtcactatcttcatgatttcatcgtataacatgttggttgtagtcctttcctgtttattcatccaatcttacagattccatttttctatactgctgattctgctaatacttctttgtctttctatcttatcatgattttctacattaatctatatagaacaaagaatgtgctcggcacattcttgcgcctgcggcggtcgcttgcgacgcctaccttgtacgccgcagtgcgcatcctaagcggagcgtttttttatatgttaggaaagaactttcctaacatataaaaaaacatctgcaaccggccaattcaggctgtgcagatgctttttcgtattttcatcctctatttcatcgcgtctttaattgctgtcagaagctcatcataagtctcatatgccggaagttccggatgatctgctttgatctgctctgtgctgcggaacaagaatcctgccttacttgcctggatcatgccaaggtcattgtaggaatctccgcttgcgatcgtgtcgaatccgatagactgcagtgctttcacagtactcagtttagactgctctacgcgcatcttgaatcctgtaatctcgccgtcctcagctacttccagactgttgcagaacagtgtcggccagcccagcttctccatcagcggtgtggcaaactgtgtaaatgtatcactgatcaggattacctgactgaatgtgcggagctcatctaagaactctctcgctcccggaagcggatcgatctttgcgattgtctcctggatctctttcagtccgagaccatgctctctcagaattccaagtctccaattcatcaatttatcatagtcaggttcgtctcttgttgtcttcttgagttccggaattccactcgcctctgcgaatgcaatccaaatctccggtacaagtactccctctacatcaagacatgttatatacatcgtaatattcctccatctgtttcgttctctaatcactttattactttactgtaatgtattgattttaacatatatgctacacatttactacttatttttttacgacagtgaaaaaggagaccagatatctgatcccctttcccatcttctattactccataataggtttcaatgcttctgcaagcttctctttctcagcttctgcctctgcaagatctttaccaagtgttgtgtagtagatcttgatcttcggctctgttcctgatggacgaacgattactgtctcgttgttctccagtttgtaaacaagtacgttagccttcggaagtcctgtttcttctgtcttctcgtaatcgatcacgctggctactttgtatcctgcgatctcttccagaggattcttacgaagattttccatgattcctgacatcttatccattccgctcagtcccgggaattcaaagctatcgatcttgttgagataacgtccgtactgtgcgtagatctcttccagtctctgtttcagtgaacttccgatacttctatagtaagcggccatctcacagatcagcatagatccgatgattgcatctttatcacgtacataaggtcctgcaaggtatccgtagctctcttcaaatccgaagataaaacggtcaacttctcctgctgcctcgaggttcgcaatctgatctccgatccacttgaatcctgtcagtacgttgcgaagttctactccgtaatgctctgcaactgcatctgcaagtggtgtagatacgagagatttcactgctaccggtttctcaggcattgtgcctttctcgatacgtcctgctgcgatgtagtcaagaagaagaactccgacttcatttcctgaaacaagctcataggatccgtccgggcacttcatagcgattcctacacggtctgcatctgggtctgttgcaagcatgaggtctgcgcctgtctctttcgcaagattcagtcccagctcaagtgctgcaaagatctctgggttcgggtagctgcatgttgtgaaatatccattcgggtactcctgctctggtacgattgttacatctgtgattccgatgtctttaagtacacgtgttaccggtactaatccagatccattcagtgggctgtatacaagcttcagtcctgcactcttgcacagacccggacgaacctgacgggactcgattgcctcatacagtccatccttacagtcatctcctacgaaacggatcagaccttcttcaactccctgagcaaaagacatatacttcgcacctgtaagtacatctgtcttctggatctcttcgtatacgattgctgctgcatcatctgtcatctgacatccatccggtccgtatgccttatatccgttatacttcgccgggttgtgggatgctgttaccataacacctgcgttacagttataatagcgtgttgcaaaggaaagtgccggtactggcatcagagcatcgtagattcttactttaattccattcgctgcaagaactcctgctgctgtcttcgcaaacacatcactcttgagtcggctgtcgtagctgatcgctactgtctgtgtaccgccctgtgtctttacccagttagcgagtccctgtgtagcctgacgaacaacatagatattcattctgtttgttcctgctccaagtacaccacgaagtccggctgttccaaacttcagcgcaactgcgaaacgctccttgatctcgtcatcatttccctcgattttagttaactccggcatcagatctgcgtcttccaggtctgctgccatccagcgcttatactcttcctgatacatcttaatcactcctattattttcttaaaatgtaaaattattgcaattcagccatacaacgtaagaccgtcagtttatgaccacttcgttgtatggctgaactgtttctaaactttacaagtctagtcatattataccatgcaggtagatttacagcaagattacttgtctattttaacaagcattttccattacatagaaataattcccaatacatttgcaatagaacttaataatataataatcaggcagatcggtgccagatatttcataaagaacatgtataatttctttctcttaaatgcagatgactgctcaatctcccttgcaatcttgtcaaatccaacggtacgaacgatcaagaagcatgttgcaagtgctgcaagtggcatcatcactgaatttgtcaggaagtcaaagaagtccagacatgccattccgaaaatctgaataaagctcagtactccatatcccatagaagataaggttccgattataagcataacagcaaccataaggatacagcatttcggtctgctccagtgaagttcatcctggaatgtagatacgcttgtctccagaagtgagattgcacttgtcactgctgcaagaagtaccaatatgaagaacaggataccagccagccttccaacgcccatacttgcgaataccttcggaagtgtgatgaacatcagagatggtcctgcctgcagattgtccgggtttccaccagagaatgcaaatacagccggaatgatcataagtcctgcgagcattgcgattgctgtatcgaaaatctcaacctgtgttgtactcttctcaagatcaacgtctttaccaatataagaaccatatgtatacaaaattcccatcgcgattgacagggagtagaacatctgtcccattgccgcaacaaccgtcattgctgagaagtgctttggattcggaatcaggaaatacttcacaccttcaattgctcccggtcttgttacagaataaattgctacgataaccgcaaggataacaaggattggcatcataatcttagatactcgctctataccattctcaactcctgccaggataacgcagaatacaagaatagaaaacacgatgaaccatgcttctacctgaaaagaatctgaaataaattctgtaaaatatccgtcctgtgcaacagtctgcacatttcctttcaaatactctgcaaggtacttgataacccagccaccgatcgaactataatacggcacgatcagcattgggattattgcattgagccatccgccgatcttaaatgattttgtcttaccaaatgtctgaaaagctccaaccggactttttcttgtcattcttccaagtgctgtctctgacatgatcagaacatatccaaaagatacggtcagaaccagataaacgagaaggaagattccccctccatatttcgcagccagatacgggaatctccagatatttcccaggccgactgctgagcctgcaacagcaagcacatatccgattttacccgagaagcttgctctctttgctgattgtccattgttactcataaattgcctcccatcacataacagtctgtactgctattttcccatctattttatagcctatactgttctattctaccattcacaatcatgaatagcaacaaaaaagagcgttgacagcgctttttaaaacacatttaaaatgctatctcggctcatttttatacgtttttataattttccttctatttctgctctttcaagcaatctctcaatccctatattccatgttccgatcttcactccggcattgatcacacgcttacatttccctattgtctcaaatgctttctgaagcgtttcttcccgaatctcctcaaacggttcttccgtgatcacttctgccgcaagtaatcttgccagccggtaatccatatcattttcatataaaatacctgccgcaaacgggatgtgctccttctgaagtcttcgataaaccgggattccagttccgccggaagagatcacgaacacttccggctcaccctccggcgcaggaagttcaatacttccaaaaagcgggtcaaaatatccattattgattccatacaattcgcgaatgatttcttctgtaaatacttcttccggacttccgtaatgtgaaatcgtctcgcctttgacacagatgatcttatctgaaatcttctgtgccagatcgatttcatgaagagacataatcaccgtaatcttcttctgccttgccatccgctcaaggatagacaacagctccaacttatattttacatccaggaatgaagtcggctcatctaaaacgatcacatccgggtcctgacagattgctctcgccagcagaacgcgctgcttctgtccgtcactaatcgcattaaaatcacggttgccgagttcctgcgcatgcaccgcctgcatcgcctcttccaccagacattcatcttcctgcgtcagaatcccaagtcgtcctgtgtaaggataacgtccagtcgccacaatatcatgacaagtcatcaactctgtcttgatccgatccgtcaacacgaccgccatcttagacgcaagctctttgtacggcagtttcagaagagaagtatcgtcaaaaaatacatttcctccaacgactttcagctgtcttgtaatacttttcaaaatcgttgactttcctgaaccattcggcccgattaaagtcacgatctcccccttgttgatcccgatattaatatcacggatcagggagcttccattataacctaccgacaggtctttcatttgaaaataataatctaccatcttattttcttcctcccttcggtatcatcatatagataacgatcggtgcacccagaatagaagtcaccgtactgatattcaattccaccggtgccagtgccattcgtgcgatcaaatcacagatcatacagaacacagctcccataaagaacgttcccggtatgaccacgatcggttttgacgttccaaatgctttccttgcaagaaacggtactgcgattcccacgaaggaaatcggtccggcaaacgcagtcacacacgctgacagaatactggaaagcaagatcaaaatcacgcgaaatgtcttgatgttgactcccatactctgcgcatatgcttctcccaattgatatgcactgattggtttggacaggaaaaatgtaaacagcaccgcaagtccgacaaccactgctgccacacgaatattgctccagctcattccggaaaaacttccctgtgaccatccgtgcagattcacaatatcagaatcatccgcaaatgtcacaacaaaatccgtgatagccgaacagatatatccgatcatgatccccccgacaagaagagacgccatatgctgcacttttttcgacatcagaaggataaatcccgtcgagatcagcgacccgataaatgctgcaagaatcagtgtatacgaagaaaatcttccgatatatttcaaatacacgatcattgtaagtgccacgaccattttcgctccggaagaaattccgagaacgaaaggtccggcaataggattagaaaaaaatgtctgcagcaaaaagcctgaaagagacaatgcaccaccaagcagcgctgccatcagaattctcggaagacggatcttccatataatattgtactctgtcgccgctccttctttcagaaagagaatgcgcaaaatcttaggcaccggaatatgaacatttccggtattaatatttagcactgtcacaacacaaaatactgctgcaagaatcagaaataccgctgtgtatcttgtacgccgtctgaaattttcctgatgaaaacttgtctgctccattcttctactccatcttttcaagaaatgtcatctgagatgcatcaccgtctgtcagcatcagatgcatatctttgatcagctctccgactgtgtctgttgcctgatataagttctttccggtataccagacatttccgtctttcaccgccttgaattcagagaacaattcattctttgcttccaactcactgatactatttacctgtccgtcgatcgtcccgttgtagatcagataatctgcatctacagcagtcgcatagaattcctccatcgtcagtttaacagatggtgcgttactgtccggattcttcagatctttgaacgcatatcttccacctgcgatttcaatcattgacggaatataatcgtcagattttctcacaacgattgaaccatccgtactcacatagaaataagcaaccgtcttttccgtgttctcgaagcctttcagttcctcgattacatgagcctgctggtcaaaaaatgtatccgcttcttcctctttattcagaagcgccccataaagcttgatccactcggttcttccaagcggatgtgactcataactggagtaatctacaaataccggaatcccaagatcttcgatcatttcctgtactttcggtgtatgaaggatcatcgttgattcgattgccagatcacagtctccgtcaacgagagtctcataatccggttcgctgtattttcccgcaaatgtcatcgctccggattccattgcttcctttgcactctctacataccagccggaagcctcaagcccggagaatttcaccttgtcaattccgccgattgcatcaaacagagacatggatgctgtcgccgccatataaatattctctgtcggctgctggatcacaacaatatcatccgccagattttccggttcttcttcaccttccggaacgatcagatattgcttatcttcatggacatcgatcaacttatatccatccttataatagtatacatcgaattctgtcgcgtaagtcagatccattgtagattcataggtaagcccttcgatttccggtgctttttttgtcttgtcggctgcatctttggtcttatcctttgttacatctgtacctgctgaattattaccgctgtttccaccggaggctgcggtagaaccgcagcctccgagcagaagtgcagctgaaagcattaacgctgtgattctgcatcttcttatcttcattctatttttctctcctatttctctgccgctgctactgccgcatcaaacttctcgttcgtcagctcttcacatccgtagagaacaccgtaaaccttgatccactcctgctttccaagttctgtcttttcctcggaagaacgatcaacaaaaaccggaataccaagcattgcaagcttttctgtcagctcttcgaactgttccgtcttctcttctactgtcagagtctcttttgtatctttactgtctttatctgctattttgtcagtatctttcgctgcattttcctcagaatcttctcttggaagaatatctcctgtaaacaatgcaagattcacttcactcttcacaaaattcttcagtttcaacttgtccgctgttcctgcatatgcaacttcagcattcttctctccgtcttttgctttcatcttatcagcaatctcagatactgtacagtctttgctcttcattccaactgccgcaatattatcaagaagatcgagatctttcatcgtattcagaatctcatcagactctgcataagtatgatccacaggtttcttcacaatgatcatatcctgctcaagaccaaccggaacttccacatcctccggaacgatcagatatttcacaacatttcccttgtaaagctctgctgccagttcctgttcgcttgtgccgttgttatccgaagctgcggattcctcggcagaagcatctactttgctttctgcatctgagttcttagaatcttctgatctattgatcgtaacagaagctactttcttcttggaagacttctctttatcttctgcagacttctcattttcagactttgtttcctctgctttttccgggtctcttgctgtgtccttcgtcatatcgatttcaagaagtacaatcccctgatcataatgataaatcttgaaatattctgcatagtcaagctttgtttctgactgatattccaaacctataatttcaggtgcttgttcatccagcttctggttactgcttgttgaagcatctgttccgtttgcagatgttcctccattcgccgctgcaagataaatgaaaatcgtatattctatctcatgtgcgacagacattttatctgtcattccaataatcttattgttctgattcaatgcaaccgggataacagctgtcgctgatccgccgccctttgttgtgtaatacttatttccgttcgctttcacatactgataatgatcactgctgaacacgagtgttgcataagcctgtccattctggatcgtcactttattacaagtaatctgaaccttacctgttccaccggaccaggtaaaacgatccggagtgtatacaccgtctttcagtgttgttccactgtctacatgagaagtagaaccacttgtatcggattcgtattttgatacattatctgcttttccgtcatttccatctgtttttcctgaattagttccagatacagaaccgcctgggaaagcagaattgtttgttcctgtattacctgtattgttggaaccaccagtagttccggaatttcctgtgtttccgttgtttccggaatcacctttattctcagaatctgtagaattaagatcggcaatcttcttcattgtctctgactggaatgtcagtgttctgtcataccagattccttttttaatagaataggctgctactgcgatttccttatccaacgcttctaccggaacggtataagtatattttccttctttattcacctgatatggaatccaggatgactgctctgcgcttgcagcctcttcctttgttcccatgtacagatagccgtaaccggttccgcttaatgtaagcacggcgctcatttttccgtcttttgctgtcaggatacaatccactactttaaacatggaagaactggaagttacgtccatactgtagattccgtttgctactgttgcttccggtgctggattcggatttggaaccggatccggtgttgaggtttctcccggattcggaatgtacatccataagtactgtttgtcataccaggtctgatcttttgactttctcaaagataccggaattgtctgacctgctttttctttcggcacattaaaatgaaatgtccatgcaccttcttcatcctttgttccttctataacagctgctttcaacaagtcatcttttgaaccaagatatagcgcatcaaatcctgtgttgtttgtcttgatcgtaatatcaagttcgccatccttttcaacaactgttgatttactgaccttgaacatcttgaactcttcagcatcttcttttactactttcacatattctccagttacagaaggagcctcctgcagtggcggaagttccggttccggagtattcatagaatcgttagaatctgtagaaggttctgacttgcctgtttcatcttttatctgtgtatccttgttatcagtttttttgtccgcaacctgatctgagacagttatgcctggatttttcccggtggtttctgtatctttctcttctgagttattttctgaattattttctgagttattctctaaatttggttttgtttctgcttcgattgaattctgattatctgatttatccgaagaattatcaactttatcagattcctctgtctgatcttcttttgttaaatcgtcatttcttttatcttctttaacatttcctgcgtcttctgtctgactctcatcttgtttcttatctagatcagcttcttccacctctacagtttcttgtaaatttgtctcacactgctgctcattttctgccgcatatgttcttgtataagacaatggtgaaatcaccatagaacctgtcagcataagcgcaagccatctgctcttatttttcatttcttttttgtctcctcttaagttgtgaattataaaatacggaaaatggatagaattatcttgaatcaaatgaatgattgctggtcacacgtaatgcgaacagtaagaatggttctttcggtacaatcaattactcgtgatctggaattcgtatattccccgcaccaacggccggcaggtttcctgacttacagatcttctatacagaacaccttcccggtctcccagtggatgtgcggactctccacacttgtctgtataggagcggtcttctgaaatctaatttctaagaagaccgcatctctgctcacagtgacgagttcgtacaggtcttacacctgtttcccttttacctgtttcaatcaggatatggaaatatattctctgatcaaacagcaccgaacgctattatttctgactaactataacatttcattatattgaagtcaactattccgccttcacggcccagcgcatcttcgtagatcttgcccttccgttctgtgcacattcctgcgctgacggacgtacaacatcccttgcatattcggaatagattccttctttgtatcctgctttgagtgctttttttacaagcttgtcctctccggaatggaatgtaagaattgctactcttccgcccggttttaatgctcccgggagtttctccataaattcataaagcacttcgaactcattattgacatcaatacgaagtgcctggaatgttctttggcaagtcttcttgataatgtccttcttttctttattattcggaaggaaatctaaagtcttctcgatgacatttctaagctttgttgttgtatcaatgcgattgcccttgcggatctctgttgtgatcgctttcgccagctcttcgcagtatggctcatctgaattctcgtaaagcattccggcaagctcttcctcggaaatgttatcaaggcgctctgctgcgctgattcccttctcctggttcagtcgcagatccagcggtccgtcaactttgaaagaaaatcctctcttcggattgtcgatctgcatagaggaaactccaaggtccgcaaggataaaatcaaatcctccaacttcttttgcaatctcatcgatcgtgcagaaattctgcagacggatacttaaaatgtcttctccgaatccctgatctgccagacgttttcttgtctttgcagactcttccgggtcaacatctgttgcatagatgtgcccctcaccgttcagacattccagcattgcttttgtatgtccaccatatccgagtgtcgcatcgaatcctgtctcccccggctgaatcttcaagaaatcaagaatctcatttaccatgatggaaatgtgcattccggcaggagtgtttcccttctggattacatgcgcaattgtatccttgtatttctccggctgtaactctttatatttctcctcgaatttcttcgggtattttcctttatatctcacacgacgcttgtgcggtgtctgtgattcctgtgtgttctgattgttctgttcgctcatttcgctctcctgttcttatctttacaacgtatgtacagtataccatgaaagttattcacaatataccatgaactttgaaatgttttccacataagtctgcatatttttcacctattcacatttttttaccggaacctgcatggattcgctattttatccggctgcatatcttactgccacgttcatcactccggcaagcatcatcacaaccaccggattcagttttgtcttacgaagcaataacagacagattccaaagatcaccaccatagaccattttgtcgccgcaaactgcacaattccatctgtccagaatgcagtgtgcagaattgcgattcctgcggatgcgatcaatgcaacaactgccggtcttagggattccagcacgctctggaacattttcattttcttatatcttaaataaaaccatgcgatcaaagttacgataatacaagacggcagaatgcacccacaggtcgccgcaacagatcccggaactcccgcaatcttgctgccgacaaatgttgccgcattgatcgcaattggcccaggtgtcatctgggaaatcgtgatcaaatctgtgaattctgtcatcgtaagccaaccatgctgtgtcacaacctgttcttggatcagaggcatcgccgcataaccgccgccaaagctgaacattccaatctgaagaaagcttaaaaacaatttcaaataaatcatttctcttcacttcctttcttcgtgatctttttctcaattaatgcgcggagtactccgacaattccacagatcagaatcacatagactacatttacctcaaatatgcaggaagctataaatgccccgaccataagtacgtatgacaaagcatctttcttcttcacgattccggcacccatgtcatatgtcacagatgcgatcacggcgcccactccggcctgcattccttcgagcattaagctgatgatctggttacttcgaaatgcctgataaccggcagaaagtatcgatataataagaaatggtgggattactgtcccggcaattgctgtcagaatccccgcaattccagccagtttatacccaatcacgattgctccgttcactgcgattgctcccggtgccgactgcgcgatcgccacaagatccaacatttcttcttcctcaatccaatgatattcatctacgaactttttcttcatcaggctgacgatcacataacctccaccaaatgtgaacgcgcttaagtaaaaggttgaccagaaaatcttccacaattttttatcttgttttttcccttgcgttttttcttgttgttcttccatatatattgtcctcgtatattatgattatgcaaattgcgtagcactagaactcccgccacactatatgctattggcaggcaaaattccctaactatgatattctttctcttgtagtctatcgcaatcaaaatgattatgcaatcgccttgaattttttacattatattttcctttttgaaaccttaattttatctgaattttccctatttggaaaatgattatgatacaatgagaacagtaatatttatcataaaggagattgaaattgaaaaacccattttttcgattctcttgtgccgttctcctgtgttgctgcctgaccggatgcggtagcatacagcacaaatccagtacggacacggcgcaggcgcagggtactaaggcaccacccaagacagcggatgatttttctatctcatcagattctgaaaatgaaactgtagatgaaacttcttctgctgatgccgccaccccatctgcttctgaatctgaatccgtaactcagcaggaatcgctgaccggcgcagcggctctttacagcaatggacaggagatcagctttgacccttcctggcaatacgcagacttttctgcaatcaattctggaacagctactatttatcttgcagattctgaccgcaaggatatcgtcgttggcgtgaatgccggacatggaacttccggtggtgcttctgtaaagacacagtgtcacccggatggttctccaaagacaaccggcggaagcactgctcagggtgcaacttatgcgactgcagtttccggtggaatgacatttaacgatggaactgctgaaagcactgttacacttcagatggctcagattctgaaagaaaagctgcttgctcaaggatatgatgtccttatggtgagaaatagcaacgatgtccagcttgataacgttgcccgcaccgtactctgtaacaatgtagctgactgtcacatctcactccactgggatggagatggattgggatatgacaaaggctgtttctacatttctgtgccggatggtctgaaaagtatggaacctgtcgcttcccactggcaggaacatgatgcacttggggtctctcttgtagaaggacttcgtacagaaggaatgaccatttaccaaaatggttctatgaatattgatctgacacagacttcttatagtacaattccgtctgttgatatggaacttggaaatgcaagctctgaccacagtgattccacactaaatagtctggctgatggtctggttcttggactcaatgcttattttggaaattagagttcttattgagttatttattttattttttaaggaggttattatggagccactcattcgtgttaaaaatatgtacaagatctacaatcctggagaaaatgaagtccgcgcactggatgatgtttctcttgagatcaaccagggggaatttattgccattgtcggacattccggttctggtaaatctacatttatgaatatgctcggctgtcttgacacacctgattccggggaatattttctggacggaaaagatgttgccaatctctcagacaatgaactgtctgatatccgcaatcacaagatcggcttcatctttcagggatttaatttgattccaaacttgaatgcacttggaaatgtagaactcccactgatctatcgcggacttggaaagcagcaaagaaaagagattgccggggaagctctatcgaaagttggactggaaaatcgtatggatcacagaccgaaccagctttccggtggacagcagcaacgtgtcgctgtagccagagcaattgccgcacagccgccgatcatccttgccgatgagccgaccggtaacctggacagtaagtcgactatcgagatcatgaatattctgaaagatcttcatgagtctggaagaacagttattatcattacacatgatgatgaaattgctaatcaggttgatcgtgttgtccgcattatggatggaaagattgtgagtgatagtgtaaatccgtagcaatttaaatctttacctgcaattacagagagagggcagtacttcacgatttctcaatcgttgaagcactgccctctctttatgtttcttattagatatttcttactggaatttctaattacttctatttactttttattctactgatacaagctcaatcttgaagttcagttcttttcctgccatctcatggtttgcatcgaaagtgattgttgtctcttccttagctgttacctttaccggaaatggctgtccatactgattggacaggtaaacctgctgtcccacttcaaggtcttcagatcccgggagttctgcaatctctactgtgaagatagcttccggattcggcattccataagcttcttccggcatcaaatggatgtccactacctgaccaacttccatatcagctactgctgcatcaaatcctttgatcatctgtcctgcaccacatacgaactcaagcggctctccacggtcataagaagaatcaaactgagttccatcattgaatgttcctttgtaatgtgtacggcatttctttccaacattctttccttccattgtagtgtgtgatccgcatccgccaccgcagctgcttccacaagaatgtccctcttcatgatctccacaggaatgtccttcctcatggtgatgatgatcacaagtagctcctttggatgtaagctcgcctttcaggtatgcctctactgcctgatctgcatctccctgtgctcctgaacataattcaacaccggcctctgcaagtgctgtctgagctccgccaccgattccaccacagatcagaacatctacgttctgtcctgcaagcagtcctgccaatgctccgtgtccttccccattagaaccgatcacttcactggaaaccaccttattatcttccacttcatacactttgaaagtctctgtctttccaaaatgctggaaaatatttccgttgtcataagttactgcaattttcattgtaaaatcctccgtttcaaaattccctgtcagactagtataatccattacgcaggtaaaagcaacctttgtgtaaatgcgacgttgcgctttgtagcagttactgttcacacggtttgcgaccagcaacgcaaacagtatcattgacacaatctcctcaagacactatacttgttataaaacttactccaaaccatcagaaagtgagcacaaccatggaatatgaacacattacccattcctttgaaccaatatataatgaagactccaagattctgattcttggaactcttccttctgtaaaatcacgggaaaataatttctactacggacataaacaaaatcgattctggaaattgttggcaaaactttgtgaggaggaaactccgcagacagttgaagagaaaacggccatgttgctccgccaccatatcgccatctgggatgttattcaaagctgtgacatcaaaggctccagtgacagcagtatcaagaatgtgacaccaactgatttgaaacaaatcttagatcattgtcagattcgacaaatctatgcaaatggaaataaagccggagctctttataagaaatatcagcagccgctgaccgaaagagacatccttgtgcttccttccaccagcccggccaatgccgcctggtcactggatcgtttgtacgaaaaatggagtgagatactgaggtaaattatattgcctcagttctcactccattttcattcgaataaattactatttcaaacaacttagattattcactaacctgttctcttctctgctcaaacactgctgccagtctcggcagaatcttattgcatgccatcgtgtatgccgcgccaaatacatttgccccaatacgaagcgctaccgcatacggcattccgaacaagccggatgcaatcgacaatgcaccaaatgtattaaatgctgtctgccatgcataccctgcagaatatccgactccaattcctccgatcattccgatgtatggatacattgactccggaagcaccaaatacaggataacaaataacagacatcctactatattaaatgcagctctctttcctgctcgttctttacagtcatccgggaatggaagacaaacagacatgcttgcgatccccgcccacattgctctcggaagtccaagcaatgacatgaataacattgcactggaaacaactaatgaaagacgaatgtaccatctgtttcttgcggagttaatattgaactcgcggaacaaatcaagaaatgatcttctatacggtctgttcttctgattcttatagaagattgccatacacaataccattccaaccaaaaggccagccacgcgatacaagtactcctgtccggtcacatcatatccctggagaagaagatatccaagaacaaatgtagaatgattatacatgatcacattgtgacatcccagaatcataagaagcaaaatacatactatattaataaagaatgccggaatcggtgacaccatgttcgaaagcttcggtcctgcaatcaatattccaaagattccgacgatggaggccaatccgtgcgttgtacgaatcccaaaatctgcctgtcgaagaacaagcaccgcaagaagcactgtaacgcctactacactgttgttattccctgtgaaatgactatataaagaaactaccgccacacaaaatgccattacaagatagactttaaaattataaataagaatgtggcgatacctttccttcttgtcttctgtcgctttgatcagctgcttagatgcaactgaactaagctgtaattcctgataaaatgtcatatatctcttcctcccactgttatttttcttcaaaatatcaacgagaaactataatacaaatccatcacggagtcaataaaaactttattaaaattttctgataaattggaattattcaaacaatatatagaatttaatttttaggctttacaaactattcgctctatgataagataatttgtgtcgagcggaagtggcggaatggcagacgcgctagattcaggttctagtgggagttttatcctgtgggagttcaagtctcctcttccgcattgatagaatgtaagagaaatccttagttcaaggatttctcttatttttttgttatctaaaattagcacattttgggttacctctgtttcctaattaaatttctgtatgaacaaagaatgtctcttttgagaaatcttgaaaaggagaattagcctatgctgaccattactgacctgattgcagtgatctcactgtgtgcgactttttatagtcttgattacgtgcgtggaaagcatgattccaagacgcaaaaataaccgcccatcgtccttgcaaaacatgagcggttatttttaatcaaacattttttcatcaggcgaaccgtcatcagtagcacctttctatttattagaatagcatttcttttttcttatgtcaaataattcttctccttttgtacattctgtgtctttaatacgtgacttatattgcggatattcagtaataaaccgcttaattacattggcatcattccagtaatgcattggaaaaatgacattgcaatctacatttttaaggaaatacagaattccgtcggcatagtgatctccctgcctcggatctaaaggaacaaatgctgcatcaaaatgcatacccttaattttcctgatttctgcacgatatgctgaagtaagtctctggttatcagctttcggctcgccatcccaataccagtcatttaagtcgccggcatgataaatggtaccttcctttgttttgacaataaatgctacaccactatcgttagacagcaatgtatcaactttggtatcattatccagattataagtctgatcatgataaacatatgtaatcttcatatctgtcaaatgatttctttttcgtatatcattcgccaggactgcctgataagtcatccccatatcatcaagaatctcaaaaatttgagggttaaaatgatccttatggaagtgactacaaaaaacgattacttctttttccttatcaaggtgcggtaattcacccttataataatcaaaaatatagtagcaatctttggtttcaagtaaaaatccactgtggttaatgtaagtaattttcataatatctcctgtataaattaatattggaaacttcataaaaaaattctgatttctatgttgtttaaattcctaataaagaatcaatctatgattgatttataataattcccaaaatcggccagtgcatctataattggcagcatttcttttccaagttccgttaatccatattctacttttggcggaatctcctgataatcgtgccgataaacaagcccgtcatcaatcatttgcctgagactatctgtcagtaccttctgtgaaatgccttcaatatctctctgcagttcattaaaacgccagggacgttcttttaaattacgtataatcaaaagtttccattttccacctataatggacacggccgttgctaccggacaaacaggaagttcatcttttgtcttcatttcacattcacctccaattttataataacacatacattttagagtgtatagttataaaaaggtacgtacttgtttttgcatgtgtaaaacgttaaagtatagatgagcaatcgaaaattgcaaataatcaagtgttgtaaacacagacaggctcacaatctccccattaacggagattatgagcctgaatttttatgaatttctcacttcttcatatttccattttgtacttttgagatactctatcaccccaacgccacatccagaaccatcatcaaactgaacccaaccgcaaagaaaactgtaccgatattagagtgctccccctgcgacatttccggaatcagttcttcaaccacaacataaagcattgctcctgctgcaaagctcagtaaatatggtaataccgggattatcagctgcgcagcaatgattgtaagtactgctccaactggttcaaccacacctgaaagcacacctcctagaaatgccttccccttactttctccttcagctctaagcggcagagatataattgctccttctgggaaattctgaattgcaattccaagtgataaagcaagcgcactcgctgctgtaatctttgtatttcctgcaaaaagacctgcatacattacaccaactgccatcccctcaggaatattatgcagtgtaaccgccagtaccatcatcgttgtacgcccaagcttacttttaggtccttctgactgttcacttccaacatgaaggtgtggaatcaaatgatccagcgtaagcaaaaacaacacgccaatccaaaaaccgactactgccgggaaaaatgataaagctcccatattttcagattgttcaattgccggaatcaaaagactccagatggatgctgcaaccattacccctgcggcaaatcctgcaagtgcacgctgcacctgttttttaagtgcttttttcataaaaaacacgcatgctgcaccaagcgttgttccaatgaacggaatcagtattccaagaaaaatttccatttacgcatctcctttcttggttagttttaactaactactcattttctaaaaatccgtgtaaaaccgaaactgtaattccacacggattattttttctctagttcagtatatcacttaaggaattgtgtagcaagaagcaacttttctacctaatcacttccccatccaattttcctgtttttttcacagatttcactcaatctttcgatttctgtgctataatatggcattgcgaaaatatacgatgcttaaacagaggtgaattacttgaagaagaaaacgcttgtgcctttcaaaagcctgatcatttccctgctttgggaaaatatcagtaataaccccttccggtgcgagttcgaatgcttttacaacacctgcttcattcggaagcatttctgccaattctgagaatgtagtctgattcagatcatatcctgcaagaatcacgttttcaagaaattctgaaagttcaacatactgatctaattgtgcattgatccgctttactgtactttgtgcagtataagcagctgctgtctttttttctttctctatgttctttacaataatacagcccaaaagaagtgctgttataaaaataagcaagccaatgatccaactgtatctttttgtctgtttagaaccggtacttcccttttccatttactgttgcctcttcatcttcaatgttttctgttgtttttaatcatgtcatgttttttcatgtctgtttttttctacagtaaacggataacaagttctttctttgtctgctgctttccttcgcattatccttaagctatttcctttttcattgccttgtacccgatcagcactgtccatacatatgcacatgttttcggaatcatcagcattccgatcatcggaacaacatcagcccacagtacaaccgggatatagaaagcaaagcttaagacgatcgtcatccacatccagcggaaagactggtcgtttctttcttttgcacttttgtaaaataaaacgatgataagtaatcccatcagtgcaaacggaatattacggtaaatgccccaggaaagcggtgcttctgcactgagccattcattctgtggcatcatacacagaacaattcttaatcctgcgagtacatagatcgctgctgtagttgcattgtgtcctttgatctgataacgttcacgccaaatatagtaaagaataacataaaagattgtcattgtaacggatgtgatccatttacctaatcctaactgtacagtgaaattctcaagacctgttgtacaaagtgcaaatgcacgtggaaccaggtggaatgcatctccacttcctaaaagaactgccatgattccaaacatggtaaactgacggtttcctttgctcttacggatcatcaagattccgattgtaattaccgagattaaatacacggcgtcaaataaagtttctactattgcctgcataataaatatccttctttcctatgaatctatatgatatcggtggcaaaagctcccaattatcataaccacgtatacatgaacattgttcattttcattcaaaaaatttcccacagcaattgtgggaatttaatacaacgttttctttacaagcatcaatacagatgatggatcataatcctgccggatcatcgacaccagaatcagggaaaacagtatgtctgcaaactttttctctgtaaattcctggtcaaatacatctgcacggacttttggatcattttctaagacctcacataatccattcagaatatgtccccatgtcttcatcattcttttcttcccacttgttttttcatctctcataaaaccaaatgaatgtaatgagaagaacccaggaaactgacgattaccgtattctaatcgttcatagatccatgagatacaggattcgacatcatgaaatatctgttcatcttccgggtgaaaaaagatttcatgccaaatactctctattgtatcactgagcaaatctgccttggattcataataattataaatagtacctgctgatacagaacatcgggacgcaacagcccgtatacttacggcagcccatccattctcctttatcagatctctgctggcagctaatatgtcttcttttgaagtagcaagatgattcacgatctcacctccgatatctcatttctgtattgtgaatttataatgaacaatgttcattttgataatatacaccgcttaggtaggtttgtcaagactgttttaacctatttcttttttcttatgtcaaacagatcttttcagcattaccagcattgtaataaagcacaaacttccgccaatcacattagatataggctctgctaaaaacacccctctcgtccccatgtgaaatgtatatggaaacaaatatgtaagcggtacaacgataaatacttttctaagtagcgagaagaaaatcgcctgcttctttttgttcaatgatttgaaaaccgtttgcccaacatattgcagatccataaatataaatgctgcgaaataaagtttcagtgcttctacgcaatcggcaagtaattcactgtctgtgctgaaaattccgatcaaaaattccggttcgaaaataatcacgctccacgtaattgctgtatagatcaatatcatacaagtcaatacgcagatagctttcttgactttcttcggacgctgagctccataattatagctcaagatcggagaagttccttcattgatagcatagatcggagtttccaccatctgacgaacacttgatacgatcgtcataacagagatatatacatcaccgccaattcctgataagacgctgttacaacatattgttaccagactattggtcagctgcatgataaaccctgcacttccaaggctcacaatattcttcgcatcatctctacatgctttccattctccttttgacagcacccgcactttcaattccgctttctttctcaagaaataaaatacatatgctgccgataaagtctgggagatgattgttgcgatcgccgctccttttatgcctaaattcaatccaaatataaacaatgggtccagaatcagattggcaacggctccaattgtaaccgataacattcctgaagttgcatatccctgcgcattaataaatgggttcatccctgttgcaatcatagatgggactattccgatcaaataaatcatcatgtatggatatgcgtaagacagcccttcttccgacgccccgaacaacaccagaatcggacttgcgaacagcattccgatcaccatcaatgccactccacaaatgcacagcattgaaaatgatgtattcatgatcgcttctgctttttttatgtttcctttgcctcggttaattgaaaataacggggcaccgccacttccaaataaattgctgaatgcagtgatgatcacaataatcggaaagcacaagcccactgctccaagcgctgttgttcctactgatgggatcctggcaatataaatccgatccacaatgttgtacaaaagactcagtatctgagccacaagcatcggtaacgctgctcctaaaatatttcctgtaactgttccgtggtcaaaatcaatctgtttcatctttataatattatcttaaaccaatctttctcttcaaattcaacaaccgtacaatcatttgcataagtacattccggaagtacgatcattgcatgaagtacctcattattcgccggaagtggacacagatgccagattgctgcattgatctttaccatgcatccctttggtacaaggaaagccttcgcaagttccggaaccggtgttccgccggaagcaggtgcaacatggataagcatgtcgtcatcgagagcaacaatcccttcccatgtagttgtatgatattccgccatcttgacaattctttcgtccttgcgaacttcaatcggtgaaaatgccattgttccaacacaggttcctgagatgcggtccggatagaatttatgaatctctccctccagtggatatccctctggttctgtcatactgcaaaatgttccgtacggtgcaaaatctgctgcattaatctttactgcttttacttctctcatcgagtaagtcctcctttgttttaatataatcgtatcgctgatggaaagcagatcagcttgctccactctcactaccaactcatcacgtctagtatatcataattaattccgaccagcaaaatctcaccgcaaaactctttgattgccgccgggtagttccgtttcttaatctgtgctgctactgcatccacattcatatttgcccagcaacatctatcttttcacatatctctgatttctgctgcgtggcttgtcaggaactgtcatctgtatcaattgaagttctattgccggattcagataattcttgcgaaatgattcctttgactttagacccaacaactccatcaaagtaactgcggtgtacggaacttcgtattccataacatctaataatcgttttacataacaatcaacattttctcttgacaattcctcaaatcttcatataattatctatggtaattaaccttggtaactatataggagttttattatgacaaataaaaaaatcaaacgcatgctcgatgcatgttatcaggcaaagcgaattcgtgagatgcttcctccgctgccggaaggtatcatgtcatctcacatccgctatatggatatgatccaggagcttcagaaacagaacgaccatgtaagagtttctgatttaagtgacgttctgaatatcccgcgaccgggtgtcacaaggacaataaaagaaatggagaagaaaggattagttcaaaagatctcctctccggatgacggacgtgtcacatacttgtctttgaccgaacatggcaaggagctatctgaaaagtataatgaaaattattttaatgagctacttccttaccttgatgctatatctgacactgaaaccgactgtatgatccggacaattcagaaattttacgacatcatgtgtgaaaggagcattcaaaatgacagataaaactgctgattttacacaaggaagtattttaaagaaactggtggcatttatgatgcctgtgcttggcgcactaatccttcaggcagcgtatggagcggttgaccttctggtcgttggaagatttggttctacctccggactttctgcagtttctaccggaagtcaggttctgaatctggtcactttcgtagtcgtccagtttgctatgggtatcacggttctgatcgcgcgttatctcggcgaaaagaaaccggaacagattggctccgtcattggcggtgctgcaattgtatttacagcgatttcagttggattgttcatcgttatggtttgttttgcacacccgatcgcaatcctgatgcaggcacctgctgaagctgtcgaattgactactgtttacatccgtatctgcggtggcggaatcttcttcatcgtcgcctacaacctgctttctgcgattttccgtggactcggagacagcaagtctcctctgctttttgtacttgtcgcatgcatcataaatgttttcggtgacttgatacttgttgcaggtttccacatgaacgcagtcggtgccgcaattgcaactgttttcgcccaggcagtcagtgttgtcttcgcagtagttcttcttatcaaaaagaatttgccgtttaagattatgaaaaaagacttctgcctgaatccacagtgcaagaaattcctcattattggactccctcttgcgctccaggaattcctgacacagatgtcattcctcgcactctgcgcttttgtaaaccggctcggactggaggcttcttctggttacggcgttgcctgtaaaatcgtaaactttgcaatgctggtacctagcgcactcatgcaatctatggcttctttcgtctctcagaatgtcggtgccggaaaatcaaagcgtgcaaagaaatctatgttcaccggaatcgaagtcggcctggttgtcggatgtttcgtcttcgctcttgtatttcttaagggagatgtcctgtccggattcttctctacggatgccgacgttattcagaatggctttgcttacttgaaaggattcgcaccggaaacgattttaacagccgtcctcttcagcatgatcggttattttaatggaaatgataagacgctctgggttatgacacagggactcatccagacacttctggtccgtctgccaatggcatacatcatgagtatccagccgaatgccagcctgacaaagatcggtcttgctgcaccggtttctacagcagttggaattatgttaaacgttggattttatgtttatttaaatcggaaaaaatagccccctgcaaccgctgccaccggcattacaaccacgcaggcgattgctccgaagatcattgaggcgcaattttcaaacatgattttagaattcaacagtagttcaaacgaatatccctgcatccgcagataggaaaaaagcagaagtgattctcctaaatatgcaaacagaagtgtattcaccgttgttccggtcacttcttttcctatctgcattccgctgtgaatcagttctttaaaagtcatatcttctttatggcttttcacttcataaacagatgtggtaactgtcagtgccatatcaagaacagctccaagagtactgagaagtataacagagacagcaacatttctcatactgatattcaggttcatattataataaaatacatcttctccaacctgttgtatctcgttaagacctcccgcctcacttctccatacaacgatatatatgaagaaaaacagcaacagcattgtgatcatagttgccagaaatgcactccatgtctttccatttctaccattttgatagaacaacgtaatacaggaaatgacaacgccgacacaaaccgtaacgagaagaacaggaactcctgatgccataagccagattgcaagacttaagatcaacagatttccacacaaagcaataagcgaaacgacacctctgtctccaccgacgaccataattaaaatcagtaaaatcaatccaagtgttatcagcattttccttctccctgcacctttcttgctttcttctgtctatgaaacattcctgggacctttatcatcacagaagtaaccaaaatagaaatcggtattgccagaacaattcctatactttccaccagaaatctgcacaattcacatggaatgtgcaattttataatagtaattaaactcacatcattattcattcgaatcagacacattgggatcagtccacagccaaagacaaacaacagcacatttatcatcgttcccataatgtcatatccaatttctcttcctgatttaaataattccaaaaatgtcacttccggcttcttttcaacgatttcgcttaaggatgcagcgatggcgaccgccacatccatgattgctcccagtcctgagatcaggatttctgcatggaaaatttcatccggattttcaatacttccaagatactccatggtcgaataatcaagatcttctgcatgatggattacaacatcaaagattcccatgatcattacaagaacaatcaatgttgtaaaaagtgctgcccatgtctttttatgaatcccgtttaatccaaccaatgtaataaccgcaaaaagaatcaccagcccgctgcacatttccagcacatttgatgtatctcccgctttccaaaaaccaattgcaaaaacagcaacattaaaaataacggtcaatatcgtaagcgcaccctgtcttcctgcaatggtaattaatacaaacattaagaatcctacaagtatcataagctctgtatctcgtttcagtccacgaattccagaacccattctcttgcttgttccattgagcagtaccttatctcccttatgatatggctgtttcgtcattccggtatacgtgtactcattcgtaaaacttattgtctttcccttgttttccccatttaggattactccctggatgttctgcttatattttttctccttcgtccctctggttcctgtctcttctcctgagacactggtttcgacctttgtcagttttgcaatgggtgtgctatacaaccatgcatcatttgcaacaaagataatacacagcagatacaatatgccaaggatacaatataactttcttttcttgctctgttttataaattccaacattactttacttccatctcgaatctatcaaaaatcatttttttattttaacgcaaaaaattttattgtcaagatgaatttgaaaatgattttcatgttaaaagaacaggacagcacgctaacgcgcactgctctgttcttctgttcttcttttctctattctactttgcttctccctccgggaaaataatcttattcacgaagaagaataccaccatcgacactcctccgttcagcacggttgttccgatattgtaaagccatcccggtacaaacattccggcaactgcaacccagatacaattgattgagtttacaatacatgtaacaatacagaatgcgatcagataccagaacgcctgataccagatctttcctttgctgcggaacacaaagcttctctggattgggaagttgatacactcaccaacgagcattgcgatcatgtatgcacagaaatacggaagacctccatgtgccgcatcatatccgataatattccacttaaatgtctcaccgaataatgtaatgtcgattcccgggaaaccgaaatcaatattcggaagtcctgcgaatgccagtggcaaaaacagcaacattacatatttaagtacagtgatcagattacttacgattacgaacaatccgccttctttgcaagttctactgctgcctttgtcaacttttgattcggttttctgttacggatatatccctgctcatatgcaacaacatccagatctgttgatccaatcacatcaaggattgcttccggctgttttgtcaggttatgatgcgcttccacatcaaatgtttttccctttgcgtcttctgttgcctgatgtgttgagaagattacatttaaaagctcatccagtctctgatccaataccgcttcatcaagatcaccattctcaactgcatgaataatatcatacatacctgattttcctgttcccggcatttccaaatggcttccgttcttcacaccaagtgcatgatcattacttccgccccagtcagatacaacaaaaccatcaaagccccactcatctaccaggatttcctgcagcatatgactgttttcatttgcatagactccatttacttcattataggaagacatgatggactttgatttaccttccttaattgcaatctcgaatccggttgtataaatctcacggaacgttctttcatccacaacggaatcatttgccatgcggcgcagctcctgactgtttgctgcaaaatgctttggacaagctgcaatacccttgctctggattccacgaacatatgccgccgccatttttcctgcatgatatggatcctctgaaaaatactcgaagtttcttccgcacagaggacttctcttaatattaagtcccggtccaaggatcacattgacacccatcgtcactgcttcctctgcaagtgcttctccaatttcttctccaagtgcttcgtcccagctgtttgccactcctgctgctgtcggaaaacaagttgccggaagactggcattcaatcccaaatggtctcctgctcctgcctgtcttctcagcccatgcggtccatcggacattaccatagacggaatcccatatttttctaaatcaactgtctcccatgtgttctttcctgacatcataattgctttctctgccagtgtcatttttctgatcaacttttcatatttcagactcattttgaaacctaccttttattgtgtactatgttactttgttacccttcgcagtacctgtgatcagttttcttgcattttccatatcacaagtgtcttttttactgaacttatcataacacaaaaagcagaccgttaaggtctgctttcataaatggtcgttttttctacatgaactgttttaataacattttttattttgattttttcaataatttcttatacgagaaatcgatcgcaaatgcgcccagcggagctgtcaacacaatcgctaaaacagccacggtaagaacggtatctccgcatgcaaatcccatcgcaagagggattccaccgattgcggcttgaactgttgctttcggtgtataagccatcatggcaaataatcgttctgtcttcttgagacttgttccaagaagacagacggatacaccaagcatacgaaacaccagtgcacctacgataacaactaacgctttcacaccgatttttccaagatatccgacattcactgttgctcctacaagcacaaacagaaatacttctgctgccacccacagctttccatatttcacagaaatcctcttcgcaacaacttctctcttcttctgcaaaccgatcccaatgaacatgatcgcgatcaatgctgaaaatgtaatcgccgtattcaaactgtcttccataacaacaagcaacagagaaatactcaaaatgatcaacactttcgaggtatctcttatatgcactttcttaaagtaatacgcaagacatgtccctattaataatccaatcccaattccaaggaaaatagaaaccggaatattgataaaactgagtatagatgtactttgtccctgcatcattcctgtaaatgttgaaaacagcacgatgacatagacgtcatccacagatgcgcccgcaagaatcagctgcggaatcccctgtttcacgccatagccttcctccatcagcttcaccattctcggtactacaacagccggtgaaactgctgcaagcacagctcccatgattgcagcttcaagtatagataatcccatcagcttcggagccaacagtacaattccaacaatctcaaacgttgccggaacaaaacacatcatcacagccggtcttccgatctttttaagtcctgaaagatccagaccaagaccggctcttgtaaggatgataatcagcgcgatctttcgaagctcggctgagattccaagaatactgtcatccaacagattcagtacatatgggccgagtatcatccccgtgatcatcattccaagcaagcttggcagtttgattttcttacagatccagcccatagacattcctacaagcaagatcaaagcaatacttagtaacatctattaaattgcaagcaagttcttaattgcttccatgtaaatctgtactgcttcttcaacttcagatacgagtgtgtactcgtctgcaccgtggatgcggtaatcaacgcccggtttctccggtccgaatgcgatgatattttttaaggacttcgcatatgttccaccaccgattactaacggtttgttctctgtatctcctgttacatctgtataagctttgtacagtgcctctacaagtggagactctttcgggaagaacaatggttttgtagttgtgtggatctcaatgcgtccgttctcgtcttcgagctttccttcgcacatcttgagcatatcttctacagaatatgttaccgggaatctgatatcgattgtagcggagatcacaccgtcttctttcttaacgattccgttacagaatgtaagctctccaaactcatctgcgcatttcagtccgattcctgatccgtcacatgctgtaccaatgtgtgagttatagaattctacgaaatcatcttcaaatccggcttttgcaagacagtcaaagataacacctgcagcattaactccaaatgccggtgtacttgcatgtgcagatactccctttgcataaatagtgatctttccatcttcctctgttactttgtattcctgaagctttgtctctgcgaaagcagcttccagtctgtctttcagtccttcttctgccggaatctctgctgtacatgcatcacatacggcattgaatacaaatccaccattgatagaaataatctttgtattcttagaagttgccagcatgccaagcatacctttctctccgtgaatacatgggtaatttgcatccggtgtgaatccacaagataactcttctgccacttcattataatgctccatacatctggaaccattttcctcattacatcccatgatcagacgaactctcttgttgagcttcacacctgaatcacgaagaagcttcattgcataaagcgcttccataacaggtcctttatcatctgttgttccacgtccgtaaacataatctccttctcttgtcaacttgaatggatcatatgtccagtcaccgcccgccggtacaatatccagatgtcctgcgataccaacgatctcttcgccttctcccatctctgcatatccacagtagttatccaggttcactgtcttgaatccgagttcatctgcaatctgcagtgcttcgtgaagaacctttgccggtccctctccaaatggcattccttctgccggtgttccaagctgtgaatctatcgctacaagtctttccatattgcttaacaattcttctgttgttgcatgaatcttttctttgatatccattattttcatccttccttttttactgttttctatcatatgatgcgagtgtcaaaagtaaattttgccactctctgatgtaaccggattgctccattgctatgcaattcccgcaatcctcgaatacctcaaactcccataaaatggtgtgttcacaccattttattccgttttcggtgttcggcgtgtcaaaaagtataaattgcttatttgtgcgagcacaaacgcaatttatactttttgacacttacatcatcatatcatgtatcgtgaaaaatttccagtcttcccttaacgaaattatcaacattttgtctataatctggattaaacaattcttccgttttagattatatactcttaataaattttacttttctttagctttcgtgacacgaggtgttcacaattcttccgtataataacatcatcaagttgatacaaatgaattacaaaagtatcatacatagaaaagaagacggtgattgtattagcgacagatcttttatgattgccggacttcgaccaaaaattacgaatagtttatatagataatggcccggtgcagtgcaccgggccacgtttttgttattatattttcttaacctctttttccatttttcagatcttccacgatttcattgtaacgttttttattcaaacgatagaagaacagaacaactgctgtgacaatccacaaaattcctggaattgttgaaaatgaatgtttcataactgcaattacttccggattctgtacctgatttgccacatatccatatttaccaagcagagctgcaaggagtgcagttcctatagccattccaattttatttccaagagaaacaaatgcatactggaatccatcatttctaagtcctgttttccactcaccgtattccacacaatccggaatgattgcatagattgcagtgttaaatcctgaaaagaagaactgtgtaatacctgccaatgcatagaatacaattggagattcttttacattaaagaagaacattacaagcatagcgattcctgtaagtaatgcaaaaacagatgctgttcttcctttattattcaacttgcggaataccggctggaagcaagctgcaccgataattgaaggaataataatacacatggaatatgttgtataataggaagcatctccttctacataagtgaaataatataaaatatctgcatttcttccatataatgtgaaaccaaacagcacctgtccaactaatgcaagcagatatggtctattctgcataacggccttcagttgtactttaatggagattttttctttctccggaattgtcacctgctcttttgtctttgcaaaacagaagaaatgacatgcagcaaagatacatccgtaaataattgcaacaaacagataaccgttctttacactgttgcttccaagcctgctgatcagtggcactgttacgatattgatgattccgattgcgatcattgctgctacggaacgagatgtattgatcttggcacgctcatcaatatcctgtgtcatagcaccgcaaagtgttccatatggaatgtttacacaggtgtatcctaagacgagaagacagtatgtaattaccatgtaaactattttcgatgtatttgaccaatctgggtgtgcccagaaagaaaggatcaaaagcactgatgtgatcggtgctgccaccaacagccatggacggtatcttccccatcttgtgtttgttttatctgttaatccacctacgatcggatcattgaccgcatcccagaatcttgaaaaaagcattaatgctgatactgccgccatactgattccaaatacatctgtatagaaaatcattaaaaagttactgacaaacatccagctaaagttacatccgacatctccgaaaccatatgcaatcttgctgatcagaggcacttttccattattactctcgttttccattaattacctcctagtcagagtttctgataaaactctgtcctctcttgattcgatcacctatttctcctgcacattgatgattactttcatcgttgtctcgcggttatcatcaatatactgatatgctttcagataatctttgaatgcaaatgtcttagaaatcaatggtcttaaatgaacctttccttcatttacaagttctataccatctacataatcatcatgacgatacatcattgtgctcttgatatccagttcgtgatcatttgcaactgcaaggtctactgttgccattcccgcaaatacggcaacaagaacgatgatacttccttttcttgcgtatttaattgcctgtcccattgtgatattatttcctgcgcaatcatagatcacatctgccttgtcaggaccaaaggcttcaaccattgcctcgccaaagtccttctccatagtattaacgcatacatcaataccacattcttttgctttatccagacgaaggtcgctgacatctgtgatcattacctttgcggcacccattccttttgctgcctgtgcaaccaggttaccgatcggtcctgcaccaagaactgcaatattcaatccctttacatctcctacctgcttcactccatgcactgcaactgccagaggctcgatcatggcaccttcttcataagacatatcttccggaatcggtgttactttagaggcatctactgcaaaatattctgaagctgttcctgttgtctggaatcccataaccttaagttcctcacaaaggttatattttccatggcggcacggataacactgtccgcagtaaacctgtggctcgatcgtaactttctgtccttcatgaaattctgtaacatcttttccgaccttggcaatctcaccggatacctcatgtccctgagtcaccgggtattttgtaaatggatgttttccatgatatacgtgaatatcagatccacagattccaatattcataatcttaactagtacctgatcatctttcacttccggaaccggtacctctctgaaaataatttctcccgggtttgtcattacctgctgtaacataatgttttcctcctttattgaatatcttttattaaatgttttattaaagtaattacattattgttcaggaaatgtattttgtcaatatgttattgttcaattctgcctattgcacaagatttcgctataatttttatgcactttgcgcaaaaaaatccagggaagaaacatgtattaaaaatgtttcttctctggattttctaactttccatcattctgatcgttataatgttttaataaaagcctgcaaataatgttttgccacaccaactgctgaggcttctctcttatatgaacaaactttcaggtatctcgcatcatgctcaaatccattatattccattacttttttccctaaagctatcatatgatctgcaagatatccccctacttctcctccaagaataatatccatatcatatgccattctcagatttgaaataaggattgccagattattaagatactctttccaaaccttcacagcctgtccgtcctgctcttccaccttcttcataaactgttccagtgtctctttggtatcatctgtcagcacgctcgccgcacagtaagcatccgcacagccttgttttccgcaataacatttctttccacccggaacaaggatcatatgtccaaattctccggctttctgattcgctcccggaatcaatttcccgtcaatacaaaatgctcctccgagtgtgttattcaatgaaagatacaatgcatttctatagttatttaaatcctctgccatcattgccgcattggcatcattttcaaaataaaccggaagtgaaaagatctgttccaaaaagcttaaactataattctccaattggagtgcatgagatttgatcagcattcgttctttcgaattaacaattcccggaattgaaattccgattcccaagattcgttctctgttttctacatctgaaagaaatctttccaatgcttcgctcaattgtaagtagtaagcagcctctgttgaaaattctaagcggatcctttcatatttctctatctcatagctcaaattcacaagtacaaatcctgcatgcttagcagtgatccttatcccaaccgcataacggtacgctggattaatactgattcgttttgcttttcgcccgcctgtagattcatattctccggtttcaaccgcaattccattagccaagagctcattcacattcgacaatacagtcggcatactaagattgagatccttcgacaattccactttagacgttgcttcgtgatttataatataatttactatttttgattttgtaatatttctcttttccgctccagccatatccaaggctccttttataaattgttttataaaagtatcttatcccttctttgccggtttgtaaaggttacaaatgcattttattcttctactttcaccggatttgtcacactgaccttgtgatcataccatgttcccttttttccgatcaatgcaagatcaaattctttgtccagtgccggaaccggaacgtcgaatccatagacctcatcagatgttccatcgctgtaattaatagtatctgttgtaggctgaagcaattctgcgccgtccttctgtgcgtcctcggcagttccttcgaacagattgacaatatttttagacaccagactgatatgaattgtcattttcccatcctctactgtcagtgttccttttccatccattgcttcattcacatggaacatagaactgtccgtctgaaattctgctgtatatgttccgtcttccagtgctgtctgctcctcatctgccttatctgcagaatcctcttttgtatccgcctgttctgtctgtgcttttccactgtctttagcctctgtgctatttccacatcctgtaaatacagatgcgatcatagaaacagaaattaataccattaatagcttctttttcatctaaatccttcctttcattaattcaaaaaaggtcatgccattcccttttctctgaacaagcatgaccttctcaatatcttcttacatattactctgcatcaattgcagcctgtgtatgtgctacatacagctgctggattgcctggatctctcctaaacctgcaatctgagtatcaatgctgtcaaatgctcctgatgcctcaaactggctcttccaggaatcgtcgtcatctccggccatatcgttgttcgcatggtctcctgcaacaaccatcagcggacgaaggattactttcttatatcctgcttctttcagtttctcgatcactgcttcgcaggatgtatcttccggttcaccttctacagttccgataaatacattgtcatatccaagctgttccatctgtgtctgcatctgagaatagctaacctttgcagtatgagatgtaccatgtcccatgaatacaaatgctgttccgtcttctttcactgcatctaaactgtcaaatcctgcatctttcactgcctctgctgtgattgcttctgctactgctgccttgtctgcattgataacagttgcatcagctcctacttctccaagaagtggctctgcaatcttaacagattcaaacttatctttatatccctctactgctgctgtaagttcatcatactctgcaccatgcatcagatgtgttggctgtacaacgaggttctttacgccattgtcaaccgctctctgcaatgcctgatccacattgtcgatcttctcaccatcacgagcctgtacatgattgataatgatctgtgctgtaaatgctcttcttacagaccagtccggatttgctgcctggattgctttctcaataccaccaatatctgttgcacggctgtcattgaaagatgttccgaagcttactacaaggatttcattttcaccaatctcatcagcattgagcggatcatccttggatgcatctcctgtatctcttccgaaataatccggatccgcattctctccctcaacaagttctttctgtgcatctgtcagtgcatcccatgcttctttcgctgctgtacactgctcatctgtcttgtctgttctttcctgaacataaatgtcatcgatcagcttcgcaactttatctgctgcttcctgatcactgtcctgtttagactctgtctttgttgtgtcagtgttgttgtcgccctttgctccacatcctgcaatcatggatacactaagtgttgctgccagtaaaaccattaatactttctttttcattgtcatcctcctgatttcttattctcagaaatgaaaacaccctcgaatcaaacgagggtacgcaaagaaaaaccgatgatcatttacaatctatctgtaaataattactgcagtctaaatcattttctttcgtacggccaattcctcgtggcatgaattcttcattcctgtactgcgaaaggcaggtctcccggctgatcgttcaaatgcttctgcttcaccttcccggtctcccagtggcctcaaaacacaagctcacgaaatacggtgacgagttcgtacaggattctcacctgtttcccttttcaccagtccagattttccacgtcgttcctctgatcattcataatcaggacgccatcatccatctgactgacacctcacgcatctgtattaaattatatgttacaacggggtcattctatcacacttacacaaatgcgtcaagaaatgttataaattggaggatttggcctcatttccgactttgatttcctcagcaaaaatgatacaatatccctcagagacaaaatttgtaactaaggtggtttattattatgaaagaatctaatagccaggcatttcgtcgtggttttcgcgatggaattccgatcggacttggatatcttgcggtctccttttcaatcggtatcgccgcaagaaatatcggcctgaatgcatttcagggattccttatgagtctgttaaataatgcatctgccggagagtatgccggactgactgtaattgctgcaaactctccttatattgaggtcgcaattgtcacattgatcacgaatgcacgttatcttctgatgagctgtgccatgagtcagcgtttaagtcccgacctttcgttaggacaccgtctgctgatgagttatgatatcacagacgaactttttggaattgcgatcagcagaccaggtactttaaatccttattatacctatggcgcgatggtaactccgcttccgggctgggcttttggaactatgctaggtgtcattgccggaaatatcatgtcaccgcgtatggtcagtgcatttagtgttgccctctttggaatgtttatcgctatcatcattcctccttcgaagcagaataaagtcgttgcgggactggttactcttgcatttatctcaagcttcgcagcaacttgcctgccttggatctccactctgtcggatggtaccagaacaatcatactgaccgtcgtactttcagccggagcagcgttcttcttccctataccgacagaagatgaaacttcagcttcaactaagcaataataaaaacgtaactgttcaattactcagaaggaataaaaattatgacacacaatatttatatttatattcttatcatgggcggtatctcttatttaatccgcgtactgccgatgaccttgattcgaaaacctttgaagaaccagtttcttcagtcctttctatactatgtaccttatgtcacactagcagtgatgacattcccggcgatccttcatgccacacagtctccaatctccggagttctcgctctcgttgttggagttgtagccgcatggtgtggtgccggactgctgccggtcgcagttctttgttgcgcagttgtatttattgcagagcttttcttgtagagtgatcttatagattttagtaactgtcgatgcccttttttctgccattgatgcttttttcgctaccgtcgataccctttttcgtttggcgaaatgaattatcttaattttctgacatttaagacaatttctttaaaaagtctaacgcaaaaatatcaaaaaaggggttgcatttttctgtagctttgatataataaccatgttgtttgaaacaagcaacaaacaaaactcaagtaatgcggaatggtgtaattggcagcacagcagactctgactctgttagtaggggttcaagtcccttttccgtagctgggaatttgcttcggcaagttccctattttatcggagtgtggctcagtttggtagagcgctacgttcgggacgtagaggtcgcaagttcgaatcttgtcactccgatgttttaagagattacagattgtaatctcttttttgttatagtctctttgttattaagtcaatattataaacaaaatgcgttgacctcaaattcacaaaaatgaaaatcagtcaacgcaccattatctattcatcaaatctttatttcagctccccatcaaatacaacggttgccggtcctgtcatataaactgtgttcttctcctgatcccactgaatctccaaatctccgccaagaagctttacagttacttcatcttctgtcaatccattcaggatacaggaaacagctacagcacatgctcctgttccgcaggcaagtgtctccgcagatcctctctcccaaacacgcatctgtacagtatgtctatccagtacttttacaaactctgtgttcacacgtcttggaaatctctcatggctttcgaattttggtccgatttcttcaatcgaaagattatcaacatcatctacataaacaactgcgtgcggatttcccatagatacgcaagtcatatgatattcttttccatccacaagaatcggttcatctacagctttatctccctcagccacaaccggaatttctgccggtgtcaagattgggcttcccatatcaactcgaaccttcgcaacttttccattttctacgaaaagctgaagtgttttgattcctgctaaagtctcaactgtaatctctgttttgtcagtcaggccgtaatcatacatatattttccaacacagcgaactccatttccacacatttctcctctagagccatccgcattatacatggccatctcacagtctgccacttccgacggacagatcaggatcaatccatcggatcctattccaaaatgtctgtcactcacctggattgccaacgctgatggatcttctaccttctcttcaaaacagtttacatacacataatcatttccaattccctgcatttttgtaaatttcattttcttctccgttccactgtcatcactgacagtcctctcatttgttattgtttacagcacttcttattcgttactgttaacagctgcctcttattcattcataattgtcagcaccatctgtgctgtttcgagcatattggtcccactttccatactgctcttctgtaaatatcgatgtgcttcctcttctgacatgttatttcgttctatcagaagcgctttcgcctgatcgattatctttctctgagaatcgtctctctttcgtatcgtttctctgcgctttcttctcttcctgctctgtgtctgctgaatcatttcaacggtatttaccaaatcataaactttgattgggagtggaagtcctacaaccccatccggcagtccatccatccacttatctgctgaagccaccaaaagcatgtcaaacgtatccggaagagattctcgtaaatctgtatactgcatatcttgaaaccgataaccacacacgacaattccattgttccagttatcagcatactgcaaaaccttagctcctgtcaaacataccgcagatacttcaatacccgcacgaaccaaactattacggatatttactgcattttccctctttgggaaaacgacaataatgttgctcatatctgctcacctcttccgctaactactcttctatcaatccgttctctctaaatgccaaatgccaggatacctgaactacagcctgtaaagataatgatcgatctcccagtctgtcacctgcatacaatattctttatattctttcttatttgcttttatgatcttctcggcaagctctttccctaatacgctgatcagcagttcatctttctcaagctctgctgtagcagccccaagcgttctcggcagttcttccacttgaagttcatctcttctttcctgcgtcatcttctgaatattttcatcaatattcttcggaggcatgatctgattcttaattccatccagtcccgctttcagaagtactgcaagtgccagatatggattcgccgtagcatccggactgcgaagttccagtcttgaattgtcttctttctccatagacacacggatcaaaggtcctcttgtcttagctgaccatcccatataaacgggtgcttcataccccggcacaaaacgtttataagaattgatcgttggatttgtaatacaggtgattgccttcatatgtttcatcaagccaccaataaaataatatccttcctgactgagtccgttctcatcctctgcgttataaagtgcatttgttccatcgtttttatataaagataaattaatgtgcattcctgacccataagtctcactcttcggctttggcataaatgtcgcgtgcagaccgtgtcgttttgcgattgtcttgacaaccatcttaaatgtcatcagattatctgctgtaatcatcgcctcatcgtagtgaaagtcgatttcatgttgcgccggcgcaatctcatgatgtgaggaaataatctcaaaccccatatcttctaatgttaagatcatatctcttctcgcattttctccaagatccaatggccctacatcaaaatatcctccctgctcgtgagttactgttgtcggtctaccgtcatcatctgtatggaaaagaaagaactcgcattccgggccaacattcatcgtatatcccatctctttcgcctccgcaacagcctttctgagtacataacgcggatcgccttcatacggtgttccatcttttttatacacatcacagatcagtcttgcaacttttccctgctgtggtctccatggaaagatttcaaatgtactcaaatccggatataaatacatatctgattcttcctcatctgcaaccccttccaaggaagaaacatcaaacatacagcggttatccaatgctttttcaagctgtcctactgttaccgccatatttttcatcgttccaaaaatatctgtaaactgcaatctgatgaaagcgacatcttcttcctctactatgtgaaaaatatcatctcttgtatagttatgcattatttttcgacctcctttatcataaactgatacgataaaagggcgttctccacctaagttggaaacgcccttgtttctgtgttacattataatgattgactgttttcttgtcaattatttctgaatcagttcaagaacttcttcttttacaggcattgctttgatcgcacccttctttgttgttacaagtgctgctgccgcattcgcaaatgtcagcatctctcctaactgttcctctgtcagattctcaaaatcatgatcaaccagataattcaaagaacttccacagaaagtatctcctgcaccagttgtctcaattgctttcactgaaaatcccggtctctctacgcgcatgcctttgtaataagctctacttccgtcttttcccatagtcagaagaatcagcggaatattgtatgtctcctgcagatatgcgattccctcatcatagtcttccttaccggatacaaactgaatttcattatcagagatcttcaggatatcacattttccaaatccatactccatctgctcttttgcaagatcaagagagctccacagcggcggtctcagatttggatcaaaggatacaaggcaaccatttgcttttgctgtttctaccgctttctttgtcgcttcacgcacaccttcatgtgtcatagaaagtgttccaaaatgaaagacttttgtatcttttactacttctggattcacttcatctgcagtaagcatcatatccgctcccggattacggtaaaatgagaattctctgtctccatccgggaatgtatgtacaaatgcgagtgttgtattcacattttcgtcaaccatcagattggaggcatcgattccggcttccgtaatcgtatctcttaataacgctccaaactgatcttttccaacttttcctataaatgctgtcttctttcccatcttgttcagaagtgccagcacattacacggtgcacctcccgggcaagcctcaaacatattgtttccctgctcgctttgtccattcattgtaaaatcaatcagaagctctcctaatgcgattacatcatacttctttgccatgaagttctcctcctatttcttgttttattactttgtcttattgcttgtcttaattaaaatatactaactcttcaattggttctgcaggctcaatattctctgcctcaagcaccggtccttctccgccgtatacggacagattcgcataacgcacttttgcacgaatttttacccagtctcccgcattcagcttcggcgcataagcgcttctgcaaacatatccaaggaaagatgtatcatctgcacagcaagtcattgccatacgccccggatagaataccttagacggaaatgcttttggtttcataacctttgcaacaaattctacaacttttcctttatagcgctccggatgctcctgcatatcaatataccagataccataatcttctcttggaatctcaatcacaggtgctttgagatcatatggtacttcgtcttcaaagatattgtctacctcaccgttctcatcctcaaagattacttctgcctgagggcttacaaccttaacacttctgcggtatcctgccaacggtttcttatcctcgcaacggttgaacagaacaagttctgcaccctttaccatctctacaaacagtggttttaagtttgtcagatacatctggaatgtacttgcatctaccgttgtgatcttctgctcaatagcccatcctgccggaagcttcatcttctcaaattcactcacctgccacataccgttatactcgataaccacacgttccggcttgtgcttcttattcatctcttccagccattcttctgtcagatcttctttatcttctacagtctcaataacgacaccatacttcagcaattctctcggatcatactcttcttctccctcttcacaaagaatcagaagtgtcttgccgtcgatctggaagtagtcctgtgacaatgtaaaattcagaaactgtgtctttccactatcaagaaaacctgtcatcagataaaccataacatctggctctttcatcatatctatctccattccgtctccctttcgcagaagacatctgttattacataatgctacgcagccccctatggggtactgctttgcttatcctttttatttcaccttaaataattctgcaagcttgtcttcgttaagctctgctccgatcacacagattcttcctgtgtattccggtgctcctgttcttacttcatgttcctctggaaccatatcaaagtagatccactcaccgtctgcacctgcaaccattccttttgcacggagtacatttccgtaagagccgtcctcttcaagagtcttcagaattgcactgacctcatcctttgtataagtatgaattgtctctttaccccagcttgtgaaaacttcatctgcatgatgatgaccttcatgatcatgatggtgatgtccgcatccacaactgcactctccatcgtgatgatggtgctcatgctcttcatgatcgtggtgatgatgctcgtgatcacactcttcatgatcgtgatgatgatgctcgtgatcacactcttcatgatcgtgatggtgatgatgctcgtgatcgcactcttcatgatcgtggtgatgatgctcgtgatcgcactcttcgtgatcgtgatggtgatgatgctcgtgatcatgtgcttctttagatacttctgcgagtaactcatcttcaagagatttgcttgattccattgtttcaagaatcttctcgcccggaagctgctcgatcggtgttgtgatgattggagctttttcattcaattctcttaacagtgcaacactttcctgaatcttctccggtttcgctttatctgtacggcttaaaataactgcacctgcatattcaatctgattgctgaaaaattcgccaaagttcttacggtaaatcttgcactttgttacatctacaactgttgtaaagctattgagctctgcatcaatctcaccctgaacatcctgtacagccttgattacatcagaaagctttccaactcctgatggctcaatcagaatacgatccggatgataagtatctacgacctcatgaagagattttccaaaatctccaaccagtgaacaacagatacatcctgaattcatctcacgaatctcaattcctgcttccttcaaaaatccaccatcaataccgatctctccaaattcattctcaatcaatacaacctgttctcccttgtatgcgtcagaaagaagcttcttaattaaagttgtctttcctgctccaagaaatcctgaaataatgtcaatctttgtcattgttctcttctcctctttctattatttcaaatccaattcaaccggacaatgatctgatcccataatatctgtaagtatcttcgcatcgtccagtctgtcctttaaactttccgagacacagaagtagtctatacgccagcctgcattcttcgccctggcactgaaacgataagaccaccaggaatagattcctgtctgctccggataaaagtaccggaatgtatcaataaatccggcatccagaagttcagtaaacttctgtctttcctcatccgtaaaacctgcattcttacggttggtcttcggattcttaagatcaatctctttgtgcgctacattcatatctccggtcacaatcaccggttttgtctcttctaacttcttcagataagtacggaagtcatcctcccacttcattctgtaatctaaccttgccagcccattctgagaattcggtgtgtatactgtgacgaaataaaactcttcaaattcacacgtaatcacacgtccttcctggtcatgctcctcaataccgattccataactcaccgacaatggttctttctttgtaaacacagctgttccggaatatcccttcttcacagcataattccaatactgataatagccttctaattccagatttagctgtccttcctgcatcttcgtctcttgaatacagaagatatccgcatctgcctcatgaaagaaatcaagaaatcctttctgtacacaggcacgaataccatttacattccatgatattaatttcaatacgctgcatcctccctttcaagagtgttgctgttcaccgtccattcgccaactcttctgtgaataatcagcaactttccataaccgaatcaataatacacctcatcaaggaataaccctcttgcaggtgctaaaaatccagcctgacttctatcttttgatttcaaaggttccttcacactctctatgcttcgtgctccggttccaacttccagcaaagttcctgtcaaaatccttaccatatggtaaagaaatcctgttccttcatattgaatactgactttgcttccttgtccgcaaatcattatagcataaattgttctttttgtggacttttcatcctttttatccgtatatccagcaaactcatacgtgccaatcaacaattgtgctgcctttctcatcgcatctaaatccaatctctgcggaaaatgatatgtatatcgtcttgtgaatacatctggtttctccgccaaatccagctgataaatgtatttttttccaactgcacttttcctcgcatgaaatccattcctcacaagctctgcatctaaaatccgaatatcttcaggtaatcttgaatttatcttttctgtaaaaaatccatcctccacccgaccagaaagaactactgttgcagtctgtccattcgcatgaacacctgcatctgttcgtcctgaaccatcaatctccactggatatcctgccactgacgaaattgttcgctccagagttccctgcaaagtgttctctgtatttgcctgtctctgccatccctgatatgcagttccgtcataagcaattgttaatttataagttctcattctcgcctcccgtgtaacatactaacattctccgaaagattgaaatcggttatactcacgaacagagtataaccgatttttattatcttagaaatttcttcaattcatccataaatgtattcgcatctttgaactctctgtagacagatgcaaatctgacatatgcaaccggatccaatgtcttcagattctccataacaatttcaccaatctcactgcttgggatttctttctcttcacgattaaaaattgacagttcaatcgcatcaattgtcttttgaatctcttcagccggaaccggacgcttgtagcatgcattcagaactccattctctatcttcgctctttcatactgttcacggttattatctttcttaattacaatcagtggaattgtctctaccttttcataagttgtaaaacgcttaccacattcatcacaggaacgtcttcttctgatagaactattatcctctgctggtctggaatcaatcactcttgtatctggattgccacaatatggacacttcatataatccactccgcctttccacgtatcttattgccttcattatacacaatgtctaatatttttgcaaaaacttttcttctttaatttccacaagaataatatccggtccaatcttctttatacatgcaaatggtatcacatattcgctatccgttccaaagaatccacagaactttcccggtcccggaacaatcaatgcttctatcgcaccggagcatacatttatctgcagatctactacacctccaaggcacttgccattgcagatattcacaacttccttttccttcaatttgcaaaatctcataggcattattccatgattgccgatattttctcttaactattctatgcatgaaatcagaatctgttgtataataaaagaagtctcctttctgtctgatcgtaagacttctttttcccttaaaagcttgtccgataaatcggcaatgcattgattaccggttcctcatatggatgtacctctttaattgcctgaattgcttcatccactttttctgtaaatacagtcacttcaactttcacttccggctcacaactaatctcgcctacatttccaatgtaaggagaagttccatctaatggtctccagtaactggtgaccttggagcaggacatacaggaatcataatttcctatatgaccggcatctactgactgcaacgctttctgtagctgcgaaatatgtgtttctggaataaagatttctaatttgcaatacttgaaatccatgcgacacacctcctcaatgcacaaacaaaatttatatcaaaatcccatcgcaatgatctatttcatgctgaatgatctgagccgtccatccactgtatttttctcttttctttttgaaattcatatcctgatattcaacttctatttcctgataacgtctgcagcttcgcactccatccaatgacagacaaccttcttccgtctcataagcgcctgtgcgtttcacgattttcggattaaacatagcaatattaaacaaccccatattcactgcaatgattctcttttttactccgatcatattcgcagccattcctacacagcctgcttcatttgctttcagtgtatccagcagatctattgccacctgcttatccgcttctgttgccaattctgatttctgatttaagaaaaatatgtctctcataataggcttaatcatactattttacttcctttccattccctgcaaaccattctgtttctatagaaattttttcttctgtcgctaagcttacataatattcatctatacatcttgtctcaataaaatattcctttgttttttcatttccccattctttgctaaatccaatgccttttactttcagcttcgcttctagttctgtccataattgagtaaatatccggtctttttccttcccacaaagttcagacattgcattttgtatttcattcgaaaatatcttcttcgctgtagcttcatgatacggacgcacacgttcaatatcaatgcctacttcctgatcagcaatcgctagaactacatatttaccgctatgtgacaggttaaaatgttttctcgcatccacaagcatcggcttcccatttttattcattacaagctgagcatcattttctacacctaaatactcttttaaaagatatcccgctatcagctcctgttttttatccgtttctctcttatgcttctgatacttttcaacatatctttgtgctatctgtgagagaatccactcttccttacatgatattttttctatatcagctattatgattcttcccttggtcatttattgtcccatcttttctatatacttttttcaagaatgccaccagcatttttgccgtgagacacacaatcctcatctgatatatacatatagcaaaatcttttctttgtcaagaaacttgatttttttgcaagaaaaaaacagcgctttcgcactgcttctcattcctgtctatattccatgtaccttcaaaactacatacagttaaaaccaacatcatcatccaaacctatcactgctttggttatgccctcgacctattagtaacagtcagctccatgtgttaccacacttccacctctgccctatctacctcgtcgtcttcaaggggtcttactaacttgacgttatgagatatctcatcttgaggggggcttcacgcttagatgccttcagcgtttatcccttcccggcttggctactctgctatgcctttggtaagacaacagatacaccagcggccagtccatcccggtcctctcgtactaaggacagctcctctcaaatatcttacgcccacgccggatagggaccgaactgtctcacgacgttctgaacccagctcgcgtaccgctttaatgggcgaacagcccaacccttgggacctacttcagccccaggatgcgatgagccgacatcgaggtgccaaaccactccgtcgatgtgaactcttgggagtgataagcctgttatccccagggtagcttttatccgttgagcgatggcaatcccactttataccaccggatcactaagtcctactttcgtacctgctccacccgtcggtgtcgcagtcaagctcccttctgcctttgcactcttcgaatggtttccaaccattctgagggaacctttgagcgcctccgataccctttcggaggcgaccgccccagtcaaactccccacctgacattgtcccccagccggatcacggctgctggttagaaacccagtactgcaagggtggtatcccaacattggctccatggcaactggcgttaccatttcctagcctcccacctatcctgtacatgcaataccgaatcccagtatcaagctggagtaaagctccatggggtctttccgtcctggcgcaggtaaccagcatcttcactggtatttcaatttcaccgggtgcattgttgagacagtgcccaaatcattacgcctttcgtgcgggtcggaacttacccgacaaggaatttcgctaccttaggaccgttatagttacggccgccgtttactggggcttaagttcaaagcttcgcttgcgctaacctctccccttaaccttccagcaccgggcaggcgtcagcccatatacctcacctttcggttttgcatagacctgtgtttttgctaaacagttgcttgggccaattctctgcggccatcttactggcactccttctcccgaagttacggagtcattttgccgagttccttaacaatgcttctcccgtcggccttaggattctctcctcatccacctgtgtcggtttacggtacgggtatcctgcaaacaatagcggcttttcttgacagtcagctcacgtgcttccctacttattttcagtccacatcacgtcttcagattaaagagcggatttgccaactcttctcctacctcgcttgtaccggtctttccattcccggctcacgctctctgcctgtgtccccacagttctgttacaggatagtacaggaatttcaacctgttatccatcgactacgtctttcgacctcgccttaggccccgacttacccagagcagatcagctttactctggaaaccttagatattcggccggaaggattcccaccttcctctcgctactcattccggcattctctcttcttaaaagtccacagctccttccggtactgcttcgtccctttaagaatgctcctctaccaattgaattctcaattccaaagcttcggcagtgtgttttagccccggacattttcggcgcaggacctctcgactagtgagctattacgcactctttgaatgaatggctgcttctgagccaacatcctagttgtcttcgaaatcccacatccttttccacttaacacacattttggggccttagctgttggtctgggctctttcccttttgaccacccaacttatctcggatcgtctgactcccatacatcatctacacggcattcggagtttgatatcccttagtaagctttgacgcccccttaggaattcagtgctctacctccgcaagactcgtatgaggctagccctaaagctatttcgaggagaaccagctatctccgggttcgattggaatttctcccctatccacacctcatccccacccttttcaacggatgtgggttcggtcctccattgccttttacggcaacttcaacctggacatggatagatcacccggtttcgggtctactccgactgactatgcgccctattcagacttggtttcccttcggctccggacctttagtccttaacctcgccagccagcgtaactcgccggaccgttctacaaaaagtacgcggttgagcatataaagctcttccacagcttgtaaacatatggtttcaggttctttttcactcccctcccggggtccttttcacctttccttcacagtactatgcgctatcggtcactaagtagtatttagccttacggggtggtccccgcatcttcccacaaggttccacgtgtctcgtggtactctggatcccgccatgtcaactcgtctttcgcttacggggctttcaccctctctggccggctttcccaaaaccgttctgctaaactcgttgaatcaattccgcggtccgaaccccagcatgcacgcacgctggtttgggctcttccgttttcgctcgccgctactcacagaatcacatgttgttttctcttcctccggctacttagatgtttcagttcaccgggttcccttccttaagttatgtattggcttaaggatacttgaggtttgctcaagtaggtttccccattcagaaatctccggatcaaaggatatttgctcctccccgaagcttttcgcagcttatcacgtctttcatcggctcttagtgccaaggcatccaccatacgctcttatcagcataaccaactcgacctcatcccacgggaatgggataacgtccacacatacatagcgttgtatgcgttggtgatagtcaatttattttaagtctgttttcttcagactgtaagttaatgttgttaacattacctcggatgtcttgattagatatttatctaaatctattgatttttactatatgtagttttcaaggtacataagatgaagttcttattcagttcttcatccgactgatattttcatcagtcattacatacacaaatctctttgtatatctaatcactggtgaaaccagctatcataacagcactgccctgctgattgggttggcggtgataagttgttgctcatctttgcctgtatctatatgttcaacttcggcagcgtctctgccttagtttctttcttttaatttggcggccacctactctcccacaccgtctccagtgcagtaccatcggccgcttaggtctttaccatcgtgttcgggatgggaacgggtgttacccctaagcgcatcgccaccaaaaggtttaggttacttgataacccaacaatagacaacagtaaaaactctctacttttttcttccttagaaaggaggtgatccagccgcaccttccgatacggctaccttgttacgacttcaccccagttatcggtcccaccttcggcagctccctccttacggttgggtcactgacttcgggcgttactgactcccatggtgtgacgggcggtgtgtacaagacccgggaacgtattcaccgcgacattctgattcgcgattactagcgattccagcttcatgtagtcgagttgcagactacaatccgaactgagacgttatttttgggatttgctcgacctcgcggttctgcctccctttgtttacgccattgtagcacgtgtgtagccctgctcataaggggcatgatgatttgacgtcatccccaccttcctccaggttatccctggcagtctctctagagtgcccggccaaaccgctggctactaaagataggggttgcgctcgttgcgggacttaacccaacatctcacgacacgagctgacgacaaccatgcaccacctgtcatccctgtcccgaaggaaaggcaacattacttgccggtcagggagatgtcaagagcaggtaaggttcttcgcgttgcttcgaattaaaccacatgctccaccgcttgtgcgggtccccgtcaattcctttgagtttcattcttgcgaacgtactccccaggtggactacttattgcgtttgctgcggcaccgaacagctttgctgcccgacacctagtagtcatcgtttacggcgtggactaccagggtatctaatcctgtttgctccccacgctttcgagcctcaacgtcagttaccgtccagtaagccgccttcgccactggtgttcctcctaatatctacgcatttcaccgctacactaggaattccgcttacctctccggtactctagattgacagtttccaatgcagtcccggggttgagccccgggttttcacatcagacttgccactccgtctacgctccctttacacccagtaaatccggataacgcttgcaccatacgtattaccgcggctgctggcacgtatttagccggtgcttcttagtcaggtaccgtcattttcttccctgctgatagagctttacataccgaaatacttcatcgctcacgcggcgtcgctgcatcagggtttcccccattgtgcaatattccccactgctgcttctccgtaggagtttgggccgtgtctcagtcccaatgtggccggtcaccctctcaggtcggctactgatcgtcggcttggtaggccgttaccccaccaactacctaatcagacgcgggtccatctcataccaccggagtttttacccctgcaccatgcggtgctgtggtcttatgcggtattagcagtcatttctaactgttatccccctgtatgaggcaggttacccacgcgttactcacccgtccgccactcagtcaccaagatcttcatccgaagaatcaaatcaaggtgcttcgttcgacttgcatgtgttaagcacgccgccagcgttcatcctgagccaggatcaaactctcgttaaaagtgtttgtatccagttcagaaccaactaactagctaattcttccctttttactgttgttttggtttgtttaaaaaccgttcttaaaaatcttctcttaaagaaattttcaagggttgttgttgtctattgttcagttatcaaggttctttgtttgtgtcgttcttttcaagcgacagcttttatattctatcaaaagcttttgtctttgtcaagaacttttttatttttctttgtcgctcttttcgagctttcctttgccgtctcacgcgacagcttatttaggatatcactttcagaactctttgtcaacaacttttttgatttatttttcaatcatttcattgatttttaaatcttccagtttccttccgatcaagaatgtcccgcctccgcgtcttcttttatcttccgttcctctgttgttttctttgctgttcctcagcgacgaaggttatcttatcacagctgtttttaattgtcaatgttttttatatatttcatgcaattcagaatattctgaaaaattagtatctgcgttccccgaccctaacagattttgcaagcttgcttgcagtaagctgatagggttggggaacatagggcgaatgcccttaaccgaaaggacgtcagttctttcggttgttgcagatgcgtaaactgcattcccacagccaatggcaagtataagcgacacaccttgtgaaatccattatttttctgtataatcaatctcatctatttatttcacttataaaggcacaggaggcacaatatgtttcattattatatgttcaacaaaccttttggctgcgtcactgcccgccgtgatagcctttacccaaccgttatggactatttttcagagttaaacaatgataatttaaatccggttgggcgattagaccgagaaaccacaggactcctcctcattacagatgacggagttttcaaccagaaacttacgcacccttcttatcataaagagaaaacctatcattttacagttctcggtgatttaaccgaggatcggtgccaacaattagaaaaaggaatcctcttaaaaggatcccctgttctcacttctcctgcgaaactaaaagtatttcgtcaggatattctttctaatataatagatactttgcatccggaagtacagagtgctgtgtgtaataatcttcctactcatccagtcacttacggagagattacgatcagcgaaggacgcaaacgtcagattcgccgcatgatgaaagccgttcactgctgcgtgatcgaattgaaacgcatttctatagaagatatcattctcgatgagacactttctcccggggaatggaaagagatttttccactataataggaaaaatctcttttttatcttcgtatatcatttaaatccaattataatctccaccggtaattgccagactcagaagtgaatccatcttctcaacttcctcttctcctgtaatcttctccaccaacacagctgtatcctccgctgcttccaaagtttcatccggtccaatttcatagtcaatatccatcccacaatccggacaaggaattgtattcattgtctgcagtgataaaaatcgacttccacattttttacattcataatatccacactcttttgtgccatctggtacataatacataattttctacctcactctcttcatcttacaagtactttttatcttatcactcaaaaaagaagaccgcaagcaacttatttcgttgcgcaaccttatctcttcctaagatttgtaatcaaaaaccgattggtttttcttgacaaactcaacttttttatgctatatctactataactctttgcactgcatataaatctacagtacaaactgagcagaccgtgatatcatatcatggagtcgggtcgcagatgcgacagtggaatctttcatccgcgggacagtagttgctaatactgattcgtgggtgtttttattttaaaacaattcttttattttcccacatatatttagtgccatagagctatcttttaattgttttattaaattggaggtaacacatatggaaaacagcacaatgaaaaccggaaatcctgtcgcaaatgaagaagatttccaaaaagtagccaacaaagtctctactattacgattatcggaaacatcgcactatctctgctcaaactttttgccggaattgttgcgcattccaatgcgatgatcagcgatgctattcattccgcatcagatgtattcagtacatttatagttattatcggaatcagactcgcatcaaaaaagccggacaaagaacatccctatggacatgaacgcctagagtgtgtagctgcaattgtccttgcaatcgttcttcttatcacaggccttggaatcggaatcgaagcattcaaaacgatattgcagggaaattctgacaacatacaaacaccaggtgtcttagcactgattgccgccataatttcaattgcaagtaaagaggcaatgtactggtacaccagatatcatgccaagagaatcgattccagtgcactaatggcagatgcctggcaccatcgttccgatgcattttcttccatcggcgcattggtcggaatcgccggttcaagacttggatttccaatcatggactccattgccagcttagtgatttttgtatttatcgtaaaggctgcttccgatattttcaaagatgcaatcgacaaaatggttgaccactcctgtgacgaagaaatggagactcaacttcgcaactgcgtaatgcgcaatccaaatgttcataagattgacgtacttcgaactcgaatttttggaaataaaatctatgttgatgttgaaattgctctagatggctccatcacacttcagaatgcacatgatgtggccgaaaaagtgcataacgatatcgaaaagacttttcctaaagtaaaacatatcatggttcatgtaaatcctgcaaaattataagtaacaagctttctctttccatgaaggaatccccgtcaatgacgaggattccttcaacgactggcagttcctgcctaaaattcatttaatcatgttctttaatatattgaaatacctttttgtcactctttgattttttataccatccaatacataccattataattccaacaataataaccgtagttcttaccgatgaattcggtgaaaataagcaagatacaatagttccggttccagcacctgtaaaaaaatctacaacagatttttcgtgctttattgtttccatcactctttctttatctatagattgtaccatttttgaaactttttatgccataaattcatctaataagtatcaatcggttgagatgaagcttgaaaacaattgaaagaaggtggcgtataaatgaaatctcttgtaaagcgggcgcaaaggggagatgatcaggcgttcgtggaattgatagaagaaaataagcaggccatgtataaagtagcggtcggtattttaaaaaacgattttgatgcagcagatgcaattcagcaaagcatccttacttgctatgaaaagctgaaagaattagaaaaagcacagtattttaagacatggctgctcagaatattaatcaataattgtaatcagatgcttagagaacagaagaaagtagtcggaattgaggactattatggggcagaagatacaaaaggaaagaaagcagaagaaaagattgcagcacctccgggagcagcaacaatcaatgaagactttctggagctgttagaccagatggaacagcaatatcgggttgtattgattttatattatgtagaagagatgagcatacgggaaatcagtcaaatactacagatgaatgaaaacacagtgaagacaagactttccaggggccgaggagtatataaaaagctatacctgaaagaacacccggaattccaatttgaatagaggatgcttttagaatgcagctgatagaaaatgcaagcaaaaaggaggttttgatgatgtcatttgaggaaaagatgaaaaaagaattgaaaaaaaacctggaaatcccagatgttgtagaacagaaaattcaggatgcatatagagaaatcggacaggggaatgttacgatgaaaaaactaaacaatggcaatcagaagaagaaaagagcatggacagcggccgcagcagcggtagcagtgattgcagtgtcaggaagcgtattttatgcaaacccagtactggcgaagaatattccagtgattggagatgtctttgcaaaactgcagaaaaataaggagaatacgccatatggagaaaaggacaagacagcatatggaaagattgcagacaattcagaaagtgtgcagaatccaggatcagaagccgaaagcaatggcgtgacagtgacagtatcagatgcatattgtgatggatatgaaatgtattttactatgacagcaacaacagataatgatcaggtaaatcaaaaggactatttattgcctgagaaaagccagcaggtttatgtaaacggggaagagacaggagctgaattgtccttgaaaaaagcagaggatggaagctttgtcggattggggcatatcagtgccggatggttggctgacaaaacatttaaagatctgtccactgtagatattaaattcactgagttgtatgcaaaggtagagaatcaacctgaaccggcaacttatgtagaaggtgaaaatctgatcacaggtcagtggaatcttaaatttacggtagatacagacacaagcctgttaaatacttatgaggtaaatacagcaaacaatggatttacagtaagtaagattgtgaaagcaccggcatccacttatttgtatctcgaagtaccggaagaatatgaaaatgtacagatgattcttacagatgctaatggaaacaagctggaaaaattcggcggaacaacaacagatccagaaaatgggatgtatgagatccagcttcagtttgagcagacagatacaaaccagattcatgttcaggttatagatatggatcagagtacgaacgacaatctggctatggttgcagaaatgacagccgatctgaattaaacaatagtcattctccgtaataacatgatgtcttttcgtggaatgacaggatggtcacaacagagttagttctgttgtgacctcttaatgtgggcataacaaagaatgtgctgctcggcacattcttgcgcctgcggcggtcgcttgcgacatctaccttgtacgccgcagtgcgcatcctaagcggagcgttttttatatattaggaaaggactttcctaatatataaaaaaatcaccgtccccacagctcctatgtctgtaaaaacagtgattgttagtgcgcgatcaggggttcgaacccggtatttacactcagaaacgcctagaaatggaggttttgcacagcgtcttggcgagtgtaacacagggtgtaacacctgatatgaaattattaaattattacaaacatactacatacttagccctatattgctagaaatattttctcattggaattgctgaacgataaatctgtacattatgaattttattctgccataataattctctgattcccaattcaaatacactttctttttctttgacataaggattcaacgtaattccctttaagctatcccttttaaatttataatccacataaggtattaaaatatttccacgtttaaattggcctttttttagaattccatcttgtccagtagtttcttccaataataattcttctggtattttcaatataaccctatactcattttcacatgaaaaagaatcatttttgaaaaaacatctcatattattaatcgcctctttgaatgcccattgaatatgactctggcatttttcaatggtatcttcttgtaaatatacttcatataaattatctagaagagctttaatacacttttgtttatccattctttgatataaaaccagtcctcggcaaatagtaatatcattttccaaatgactactattatttacttccgagatatcgctgccctcaaacaaattccatgcaaaatcaaaaataagattaacaccacttccagatgttgcataataattccacatagtaagtgaatctttgttcgttgaaaaagaacacgtatatgttctatagactttttccgcataattttgcgtatttttttcttttcctatatatggttgtctataagattctaattcttttataagactgtcattaagaatcatatctataaactctgatgcgtattcttcatgctgtgcaacatatttcactaagggaataatttcaataaattctgtagaatcatttaaaaaacgcacgtcactaaatcgcaaactttcgttttctaaaatatttttgagtacatctacagaacaataatgacaaattcttgatgctttatttccaatgccatctactccatatatttgatcaattgttaaatctttataaggaacattcaaaaaatgagattgcgaaattgctatacattttgctaacatatcactttgcatatattattctcctcgattttatttcattaagtttcatttttcatattttagtaacccattcactttatttgcttttgctcgcctcttttagccgtctatcatctatccttttgggaatactattccccgcaaatattacaaataatgaattcctcctctttgcataattctttcttttacttcttctgcagaatcaaatccttctgctgccaaactttctgttgcctcatttaacgcatcttggacgccttctctcatttcgtcaattctctgcattgcaaactttttacccaacccgatagctaccgcttcatcctcaaaagattcttttgtaatttttcgtatatcataaatcccaccaattcctaaagacatattttctgtgctactctcataaatcattgtgctgaccatgtcatatgccggcgcaagacgaatgtcattcaaattctctgcataaagcaacgatacattttttatatgattatctgtatttccaattagataattaaagatacaaatatcccacaattttttctgatcttctaatggatttgaagagtattttttaatcacttcaaacattttctttagataatgatcaccttttttttcatatttcattgaagatgaaattcccatcgcctgcgcaaaatcttcctgatgcaacctaaatgggatctgaagatcttttaacatataattttcttttttaaattttctatcataccgttctgttgcaaataaaatattttctccctgcatcttctggctatttataataaaactatttggtacttttatccctaaattacttgccgtcaaaagacacagttgctcatttacaacaattttttccaaacgtacatgactttgtttcacaatatgtgtactcggcatagatcctaaaggaagataccattgagaatcagccttatcataatacaaacccacttttcccgatgctccagttaaagacaaatgcgattttgtcacaatctctgcactttccgacgctccttcttttgccagtatctcaacctcacgttcagttagttttcgataatccggtactattttctcactattttcatcaagaatctgaattgcaccaagacactcattgccaagtccagccaaaattgaaagataatcattcacatctttttgcatccaatctgcaacacattttcttgtgaacccttccggcaaaagaccttcaaaaaaatatcttgtccttttttcatcaaaggctttctcttctaaaggtaagctaatagaaattggttttccattcttttctatgtaactatcatcataagaaaaacaagcatctactgaagaatccccaacaatcttacctacatattcctgttttccgtttttctcaatataaacagataatattctactcatctgatcccctcttttctatttttatatccattcctaacagttgaattaactgtaaagcttttccaatctctgccgtcttcttccctctttctaagtcagaaataaaactgatactgaatccagtaaattctgccaaatcactctgcgtataacctaattcttttcttcttgcccttatagttgctcctaatgttatcgaatctataattttcatattgtctccataaaattagccgttcggctttattttgttttcaatttgattttttaagccgttcggctttattcctgtgatttaaatataaaataagccgttcggctttgtcaacaataaagtaatcttcccacgtacgaaaaagcacctacaaggtgctttttaatgttatgtcaaagtccttcctttcggtaagcgtttaggaagttgttcgcaaattttaatatcttgaaatatgtacatcacactcctcccaagctaactggctcatgaatttctatcccctcttccaacgcagcttcaagccacgccttttttgcatcctgtgcattttctactgcactttctattgtttcgccacaagtaatacagcctggcaaatctggataaaaaactacaaatccgccctcttctttgtcttctacaatttccatacggtaggacattgccatgtaatcattcaaggttttcattcatcttctcctcgcgttactaaaacatatctccaaacatttctccctctatatcacttatctgttcaattgggataactgtcttatcttccataacaactgtatgttcatatttatcaatccttttcacataactagcgtgagaaatatatgctcccccagcttttttattatccggtacaaaatatgtgattctgaccacttgttgtgtaccaatggtttcagcaatcagttttaacttctcattcaattctgctatgacttcatcactcagcatcaatttttcatctgttcgtcttgcagtttccttaatggctgcttcgtgtccggtaagtgctgcaaaaggtgaaaactgtgctgccctgtcagaaaggggcatacgaggatgttttgttgaagttggattcggcagatttataatatcatcatagctgtgattgtcttggttctccataatcttcctccatttacagtggcataggtgtccgtattttctttctacgccttgtgtccacctatctgttcgttacggtcttttgctgttgctccctcttgaaggttcattcccttcaggatagcattcttcccgaatttcttttttattgtaagcattgtctgttgcatacgtctttcacgttctaaaactgcgtcttcttcagcttgctcctgttcttttgccttataatccgtaaaaaggtcaagctgctcatacttttcttctttctttgctatgctctcgtctactagccgattcgctgtaatattaattcttctgataagcagatttttatccacgattctgtcatacagctcaatcacagcatctgttatgagtattgttgacgatgtctgcattttcaagttcgttgttccatgtgcatgtttcggaacttttcttccatatctgtcaatcgtaacatcaccattatatttcccgctcctatttgggtctgtcagattttctatatcataacctacagtcaatacaacctgatcggtaacaagtcccttatcaactagatccaaaaccataagatcggtcatctcttttacagccagcttcgccttatcaaaatcatacgggcagtgaagtacttgtccggagcttacactgttagtttccggcttgtacgccttgacatgctccaaagtacaaggctcgtatccccaggcatgatctatcaacaattctgcattgattccaaacagcttataaagaagttcttcgttatacagttcatttgattttccaatagaacaccttgcaatatctcccatcgtaaaaagtccgtgttcttccagcttctttgcataacctttgcctactctccaaaagtctgtaatcggtctgtgactccataattgtctgcggtatgacatttcatccagttcggcaatccgcacaccattctcatctggctcaacatgctttgccacaatatccatcgcaatcttacacaaatacatattcgtgccgattccggctgttgctgtaattcctgttgttttcaaaacatcctgtatcatcgtcatggcaagttcccttgcagtcatctgataggtgttcagataatctgttgcatctatgaatacttcatcaatcgagtaagggaaaatatcttccggagcaatatatttcagatatacactgtaaatttttgtgctatactccaggtaatatgccatacgaggtggtgcaacgatataatcaatctctaacgccggattcgtatttaattctgtactgtcatcggatgaaccagtaaatgatcgattcggtgctttccacctgcggctgttattaacttcttttaccttttgcacgacttcaaacaaacgcggtctgccgggtatcccatagctttttaatgacggagataccgcaagacatattgttttctccgtcctgcttttatcagccaccacaagatttgttgttaaaggatcacgatttcgctctttacattccacagaagcatagaatgatttgaggtcgattgcgatataggtcttttgctttgccatcattctacgccccctttttaaattcctttaagtaaattatgctatagtataatcaatttaacagaaaaaagtcaaccgtatataatatttctttaacctgaattattcatggaacaatatctgaactaataactgtgccatgaataattcaggtcaattactctttttatctttttcagaactttttgggactatttatttcctcgcgaccaatctgcgaccagttcgcgacagatttcgcggcaagtcacttcgtctttacaattcatagcgatttctggttcaatggtcagaaaccgcatatttgcgcacaaaaaaatcaccgtccccacagctcctatgtctgtaaaaacagtgattgttagtgcgcgatcaggggttcgaaccctggacaccctgattaagagtcaggtgctctaccaactgagctaatcgcgcattcttttgtttttgtgtctcgtgttcctcaacacaaatagtattatatatcagttgttgccagaatgcaaccccttttttcaaattttttcatttttttcaaaattattaatttcatatacaattcagacgatatcagcaacgtttcttctttcccttgtctttgttgcaatatcccctattcagaattcgatatacctcctcgaaggatctgcaaatgcagacaatccttcgattcagtctctgatgacaataacacaactcacgggccccagctttccaacatttcccccgtctcatcctgttctcctatgaattctgctctttctatataatatatgatgcttattttctctgtgcgatcagcttattgattggatttcccttctctgaaaatttctgctcatattctgtcataatattccccttattcatctcttcctgatgatgtaggtcgtaagtataagcaagcagttcccatccagcttctttcacctgctccagagaaaagttgaaaagttcagtattatctgtcttaaattctactcttccattttccacaagaaccttctcatatcttgcaaggaattctgttgatgttaatctacgtttcgcatgtctagcctttggccacggatctgagaagttcaagaagatcttatccacctctgccggtgcaaacactgcttcaatctctcttgcatccatgcagataaaacggatattctcaagattttcaaattcctctgtatcatatttttcaagtgcacgaagcagtacgctggaataacgttcaattccaataaaattgatctccgggtgagccttagccatattcaaaataaactggccctttcccattccgatttcaatctgaattggtttctcatttccaaagacctgagcccactgtcctctctgctcctctggtttcttgatcacagcacgatgtgcatcgatcacgccatctgctcttggtatatttcttaatctcatctgctatttttctcctgttcttcaccacagcattactgcgtactttctatatataaggtaaaaccttctttgatatctgcggattatttcaggtcttatcataacatgatttttctcatctcacaactaattactgtccacacaagaaagccattttgaagaatactaatgacattctcagactcacagtctctatctccaatacctctggatatttaacataaattatcttttcagattgcttgtaattttctccaaaaggtgtattataaaagatattatgaatttctaacaaaaaggaggctggttatggactctattataaacaaattgacagagattgaatctgccgcatctgcaatcgtgcaacatgcagaaaccgaaaagtccgcattagatgaaaaatttgacaaaaagcggatggatttcgacaaagagcttgaagccgatacgcagcggcagattcaggaaattcgtgacaaactggaagcggagacctcacggatcttatccgggcaaagtcaggagagtcaggatgaacttaatgccctgcagaaggaatacgatgaaaagcattctgattatgctcatgagattctccgacggatcactgaggtgtagcctatgggaaatctactggaatacagtggtattgtaacgaaaacccgggcaatggaagccaaactccttaccccggcacagtttgaggaaattgcttctctacataatgttcccgaggtagttgaatatctgaagaaagaaactgcttacgcagatattttagaagaactggcccccgaacagcttcacagaggaagtattgagaagattctgactcgttcactttaccgcgactacgcaaagctttaccgcttttgtggacagaaacagcgtaagcttatgaagcttcgcctgaaatcttatgaagttgagctgatcaattattgtttgaggattgtgatcaaccattatcagaaaccttttgatcttgattacaaacgtcctttctttgatcgatattcgcagatatcgatcgagaaactgatcacctcacgcactacagatgaactgatcgagacattaaaggagacagaatattatgaacctttaaagaaattaaaggattccccttcggtcactctttatgactacgatctggcattaaatctttattattttacaactctttggaaagcacggaaaaaggttctgaaaaaggaagacaaggaattataccagcgggattgcggcactcagattgatctgctcaatatgcagtggatctacagagccaagaaatattttaatatgaaacctgctgacatttatcagctgattcttccaatccactatcgtctgtctaccgacctgatcaaaggaatggtcgaggcaacgacattggaagaactgcagacactctgcaatcagactccttatgcccgccgctatgaatccactgagcagcttaccatggagcagatgtattcagaatgtctccatcatctgtacaccattgacagaagacggaatccttactccatcgccgctgtcaacacttacctcttcttaaaagaagaagaaatcaaaaagctgactaccgctctggaatgcatccgttacggactgacaccgggcgagacgttagcgtacgttggaggtagaacccaatgattgttaaaatgaaatttatcaacatttccggtccgcgggatgatatcgaccgtgtcacagacttgtatctctcacgttatgagatacagctggagtccgcactgtccgagcttaagacagtcgataatcttcgcccgttcgtagaacttaatccgtaccgggatgtacttgcccaggcaacccagttcgtcggctatcttccgaatgtagatgatgttacaccggatgaatctttaggtctcgacgacatgtttgaggttgttcgcaaagcctgtgaagattacgaaggtctgcaggcaaagaaagagaaaaagaaagctaagattgaagagctccgtgccaaacagcaactgctctccccattccgtccgctcgactgcgacctgcacaaggtccttggatatcgatatattacatatcgtttcggacggatcgcgctggaatcttatcacaagatgaataaatatctgatggatgatttgagtgcaatcttcgttgaaggtgaacgcgatgaaagcttcgtatacggcgcttacttcgtttctccgggagaggctcaaaaagtagatgctgtgttccgttctcttcattttgaacgcatcgaactaaaagacgaattcgaaggaactccagcttttgcctaccagtcactggaacgggatattgctcggatcaatctggagatccaggatctggataaagaagccggtgagatgctttctgaccgggcaccacagcttattgcagcgaaaaaccgtctggaggaactctccaagaactttgacatccgtaagatggctgcccggatgaaagacagccaggatgattcttatatcctctgcggatggatggcagaagatgatgtagaaaagtttttggaagaaatcaaagatgatgacaaagtctttgtcgttgtcgaagacgatcatgatgcatacttcggagaaccgccgacaaagctggaaaatccgaagctattcaaaccatttgagatgtacattcagatgtatggtcttccggctcacaatgagatggatccaaccattttcgtagcaatcacatactcttttattttcggagttatgttcggagatgtcggacagggacttttgcttttaatcggtggagccttgatctatcactttaagaaagctccacttgccggaattatcgcaactgccggtgtattttccacaatcttcggatttatgttcggaagtattttcggatttgaagacatcattgaaccattgtggatacgaccgatcgaccatatgactacactgccgttcctcggcaaactaaacacagtgtttatcattgctgtcgcatttggtatgttcctgatcatcgtagcgatgatcctacatattatcaatgccgcaagaagcaaagatatcgaaagtacctggtttgatccaaacggtgtggcaggacttattttctacattgccgttgtagtaaccatcgttctctttatgacaggcaatccgcttccgggtggtattgtcatgggtatcatgtttggtgtcccgctgcttctcattttcctgaaagagcctctgacccgcatgattgagaaacgtgccgacaagatggaaacaggccctggaatgtacatcgtacaaggctttttcgagatgtttgagacattgctcagttatttctcaaacactatttcctttatccgtatcggtgcatttgccgtcagccatgccgctatcatggaagtagtacttcagctggccggcgctgaaagcggaaatccgaactggttcggagtgatctttggcaacctgttcgtatgcggattcgaaggactgatcgtaggtattcaggtacttcgtctggaatattatgagatgttcagccgtttctacaaaggaagcggacgtgcattcgacccatatacaaaaaagaaaatgaaataactgtctggcttaaatctatgacagccataaaatgtatagaaatcaggaggattccactatgagtttagcaacaaaaatcatctttatcgcagcacttgttttaagtatcatcatcccattcggatattatctgatcggtgaaaagaacaaaaaacgctacaaacgtacaatcggtgtcaacgcatttttcttcttcggcgcatttgccattgcatctatcatgatgcttgcaggtccggcaaatgtacaggctgctgaagctgccgcatcttccggtgctacaatcgcaacaggaatgggatatcttgcagccgcacttgttacaggtctttcctgtatcggcggtggtatcgctgttgcaagtgcagccagcgcagcacttggagcaatcagcgaggattccagcgttcttggtaaatccttgatcttcgtaggacttgccgaaggtgtttgtctgtacggactgatcatctctttcatgatcttaggaaatctctaatttctgattttcaacagaaaggagccgcctatgaaaatgtatctgatcagtgacaatgtcgacacttacaccggaatgcgtcttgccggtgtagacggagttgtcgtccacgaacgggatgagctgaaacaggctttggaaaaagtgctttccgatccgactgtcggcattgttcttctgactgagaagttcggtcaggaatttcctgacattatcgacactttccgactggagcgaaagatgccgttattgatcgaaattcctgaccgccacggaaccggtcgtcagaaagactttatcacctcatatatcactgaggcgatcggactgaaattataaacgcaattatattacgaactaaaggagggattcctcttgactctggaagaaaaaatcgcacacctgcaaaccacatccatggagcaggcccgcttagagggaaatgtcatcattgacacccatcaggctgccctggagaaggttttcgaagatcataaggcagaagccacaagacagtcagaaactcgcatcaaggcggaagctgccaatgcgaagctctcactgaatcaggcgctcgccaagtcccagctggagatcaaacgtcgtcaaagcaaggttcagcaagaattgaaagacaagatcttcgaggaagcagacgcattaatcgatgaatttatgaagacggaagcttatgatgattttcttatcaaatgcatccgcaaagcggtggcttttgccggaaatgatgagcttacgatctatattaacccaactgatgaaaaaaaacgttctgatctggaaggtgctacaagagttcatctgacgatcagcgccgaagatttccggggcggtgtccgtgctgtcatccgttcccgcaacattttgatcgataattccttcagcacacagctgaaagaacagtatgacaaatttgtatttttaggaggtgacggcattgcttaagacagcgaaaatttacggcatcaatggtcccgtcatttatctgaaaggcaacacaggattccgtatgtccgagatggtctatgtcggcgaacagaaattagtcggagaagtcattgcactggataaagatatgacaaccgttcaggtttatgaggaaacaacggggcttcgcccgggcgaagaagttattgccagcggaagtccggtatccgtaacacttgcacccggtatcctgaacaacatttttgatggtatcgaacgtccactggaagatatcgcagaatcctccggcggcgcatttatcacacgcggtgtcagtgtcgattctctagaccgtacaaagaaatggaaaacacacatcactgtaaagcagggagattatctccatgcaggtgatattatcgcagaagttcctgaaacacatgcgatcactcataaatgtatggttcctcctgaagtagagggaactgttcttgtgactgttgcagacggtgaatacacaattgacgaacctctggttcgtctggaacttcctaacggacaggagaaagaactgacaatgactcagcattggccgatccgtactccgcgaccgactcatcaccgtttcccggcatctgttccgcttgttaccggacaacgtatcatcgataccatgttcccgattgcaaagggcggtaccgctgccatcccaggcggattcggaaccggaaagaccatgacacagcatcagatcgccaaatgggccgatgcagatatcatcatctatatcggatgcggtgagcgtggaaatgagatgacacaggttttggaagagttcagtgaactgaccgatcctcgtaccggcaaacctctgatggaccgtactacactgatcgccaatacttccaacatgcctgttgctgcccgtgaagccagcatttacaccggactcactctggcagaatattaccgtgacatgggctacgatgtagcaatcatggccgactccacttcccgttgggctgaggctcttcgagagctttccggacgtctggaagagatgcctgccgaggaagggttcccagcttacctcgcatctcgtctgtctgcgttctacgagcgcgccggaatgatgcataacctgaacggaacagacggttctgttacgatcatcggtgctgtctccccacaaggtggtgacttctccgaaccggtcacacagaacaccaagcgtttcgtccgctgcttctggggactggataagagccttgcctatgcaagacatttcccggccatccactggctgaccagttacagtgagtatctgaacgacttaagtcactggtatcaggacaatgtatctccgaaattcgttgattaccgcaaccgtctgatggcactgttgaatcaggaaagcagtcttcttgagatcgtaaaactgattggaagcgatgtactcccggatgatcagaaacttgtccttgagattgcccgtgtgattcgtcttggtttcctgcagcaaaatgcattccacccggatgacacctgcgtttctatggaaaaacagttcttgatgatggatacgatcctgtacctttacaagcaggcacgtacccttgtcacaatgggacatccgatgtccgtattaaaatctgagaatattttcgatcgtgtcattgcgatcaaatatgatgttccaaataaccgcccggaaatgtttgcacagtatcacagagatattgacgctttctatcagcacgtacttgagaaaaatgcataaggagggaccactatcatgtcaattgaatatcttggcttaagcagtatcaacggccctctgatcgtgttagagggcgtacaggacgccttttacgatgagatcgtagaatttgtcgtagacggcacagaacgcaaaataggacgtattgtagagatttacgaagacaaggcagtaatccaggtcttcgaaggttctgaaaatatgtccctgaaaaatacacatacgaaactcaccggacacccgatggagattgcactctccccggatatccttggccgtaccttcaacggtatcggacagccgatcgatgacctcgggccgcttgtctccactttaaaaagagatgtgaacggacttccgctcaacccggtccgcagagaatacccaagaaactatattcgcaccggaatttccgcgatcgacggactgacaactctgattcgtggacagaagcttccgattttctccggaaatggacttccgcacgatcagcttgctgcacagattgtaaaacaggcttctcttggaagcgattctgatgaaaaatttgcaatcgtattcgctgctatgggtgtcaaacatgacgttgctgatttcttccgtaacacatttgaagaaagcggtgttgccgatcatgtagcaatgtttttgaatctggcaaatgacccggttgtagaacgtctgatcacaccaaaggttgcactgacagctgcggagtatctggcatttgaacaaaatatgcatatcctcgttatccttaccgatatgacttctttcgcagaagccatgcgtgaggtctcttcctcaaaaggagaaattcctagccgtaaaggattcccgggatatctgtatagtgaactggcaaccatctacgaacgtgccggtattgtacaaggcgtaaacggatctgtaacacagcttccgatcttgactatgccaaacgacgatatcacgcatccaattcctgacctgacgggatatatcaccgagggacaaattgtacttgaccgcccgctccatggacagtcaatctatcctccgatcaatatcctgccatccctttcccgtctgatgaaggacggtatcggagaaggttttacacgtgaagatcatcaagatcttgccaatcagttattctccgcttatgcaaaagttggagatgcaagaaatctggcttctgttatcggtgaagatgaactttcaccactggataagaaatatctggaattcggaatcgactttgaacagcactacatcggacagggtgttaatgagaatcgtacgatggaagagactttggatctgggatggaaacttttaggaaaactccctagagaagaactcgaccgtgttgatacgaagattcttgataaatactataaacctgctgtagaagactagggaaaggagggagcttcatggatccacgtacatttccaacaaagggtaatctgatgctggccaagaactctcttgcacttgcccggcagggttatgatctgatggataagaagcgtaacatcctgattcgtgaactgatggatctgattgaagaagcacgcaccatacaggaagagattgattcaacatttacttatgcgtatcaatgtctgcagcgtgctaatatcgaaaacggtatcagcatggtagaacagctcgcctacactgtaccgattgaaaattctatcacgatccagacacgaagtatcatgggaaccgagattcctcatgtgaaatatgtaccggacgccggtcagccgacctatgccttcagtaccacaaaggaatcgatcgatattgcccgtgaggccttccgcaaggtaaaagaccttacgatcaagctctccatggttgaaaacgccgcttaccgtctcgcaagtaatatcaagaagacgcagaaacgagcaaatgctctccagaacattacaattccaatgtattcaaatctggtctattcgatcaccaatgcactggaagaaaaagagcgtgaagagttcacgcgtctgaaagtgatcaagagaatgaaagagaaaaaagcctccggttaacgggggcttttcctttccacaggatactattctcagtatgcctgaatcttatatcattttattgcaacaacgatctgatattctttttcaaaaaccgctccgctctctaccttattaattccaggcttctcagagatttctttatcaaatccaatattatcgcatcttcccatccatggttccaggcaaacaaacggtgcgtcttttacagaccagattccgtagcttggaaatccttctgacttaactcccacatacggagttccgtctttatgacagatccatgcttcttcaatctgcgtattatcaaagatcaacgcatcattttcaaaaagttcttctgtcaacggatatgtctcttcatttagtttcatctcatgcagttcctccggatcaggagccatttctttcatattgatcagacaatacttcaattcatcttttccagggaacttcagaatataatctgtctttccttcctcgttctttgcaaagcggaaggccggatgcgctccgattgtgaaataaattgtctcatcagacgggttctttacttcccattttacatggagtacatttttttccagtgtataagtaatgaaaagttcaaaatcaaatggataaacttccttcatctcttctgttgatgtcagaagaaagattgatgtttctttgcctgcatgaatacatttgaactcactgtctcttgcaaatccatgctgtgatgtcggatagtgtgtgccgttgatcttcactgtgttcttataggtttttcccacatttggaaataacaccggtgaatgacgtttccaaaatttgggttctgcatcccagagaagatctgtacctgttttcttgttatacagttttgtcagctccgcaccatgctctgcaatctctacgctgagcacatcattctccattttaatcatgatttttgttcctcctttattcccctttaatttttatcggactgctctacctgtacgcaattatctaccagataatccagtactttatcacgaaggattgcatctttcagaacatcttctcctacctgctctttgtaggtatccagatctgctccggctttgtccgcatactcctgcattccttttttatattccttatcagacggttccagtttctctttcttggcgatcagttttacagcttcttcaagctgaacagcctgctttgctgagtcttcaatttttttgttaaattgatcttctgtcatcttcagataagttgtaataaaatcactcagctctactccgtacatctgtgcgatctgtgtatagtaatcatttgcctgtttcacctgctcatctactgcaccgtcaggatatttatttacctctatctgatccagtaaagcagtctgtacttcttgtttcaactgtgaattacctgaatcgtcctgctgctcctgaagagaattttttacctcttccttgtattcatcaaccgtcttgctgctttcactattatttgcaacccactcgtctgtaagctccggtgttactttttgataaatcttattcaatacaatgtggaaatttgccggttttcctgcaagatcagaactctgataattctcaggaaactgtacagtgatatcaaactcttcgccggtattatgtcccacaatctggtcttcaaatccctgataatcgcctgaagctccgataaacgatcctgatccaagttccagatcatatcctgtagctgtgccaccgtcaaatgcaactccatccagagttcctgtatagtcaatatttacccagtctccgctctgtgccgcgcggtctgttacatcctgttctggcgcagcagcttccagtctggactgtatctcctgctctacagaatcatcggacacctcgtttttggcaacctctgttacttcaagtcctttatatttgttcactgtcacataatcattagacaacttaccacttccgcatcctgctaaagatgctgtcatcagaaccgctgtaagaaccgcaatcactctttttttcattttcctgtttctcctcttttataatttcttttttatttttttgtcttatccactataaaagtggtgacagtaatctggaaaactgttccttgaaccggatcagtaaattcctctcctcatatatctttcgtgtcacttgcgtactctttgtcatatcattctcaaaagctctttccaacctctgcactgtacgctcactatagattgttgcattcacttcaaaattcaagccaaaacttcggatgtccatattcgctgtacctacacaggcaaccatgccatctattgataatgtctttgcgtgaaggaatccattattatagacataacattttgcgcctgctgcaaccatctccccaatataagaatacgttgcccagtaaacgaatggatgatctggtttgcatgggatcataattctgacatctaccccggatctgcttgcaatcttcaacgcatccagaatggacgcatccggtatgaaatacggtgtctgtatataaacatgatttcttgcactgtggatcagatgaagataattgtcatggattgtcttcgtctgtgaatccggtccacttgagataatctgtaccggatcaaatccatgcctgtcatactgcggaatctcaaacaaatgatcttccaaaaacaagttctcatgagctgcataattccaatccaggacaaacctcactgcaagagatgtgaccgctgcaccttcaatacacaaatgtgtatctctccaataaccaaacttttcgtcttttccaatatattccctgcctacattgaaaccaccaacaaagccaacctttccatcaatcacgacaatctttctgtgatttcgataattcacacgcatctgaagctgtcccagaatcgccgggaagaattctgcgacccgaattccttcgcatttcagcctgtcccaatctcttttgtgcatggtacgacatcccatactgtcaaacaaaactctgacttctacaccttcatgtgctttctcgatcaataccttctctatatcctgccacacttcatcattcctgataatataatactgtacatggatatatttcttcgcacgtttcatttcctcgatcagtgcatgaaacttctctttaccatctgtataaatacggatatcattattatctgtcagaactgcctgtccggcctccagattataaagcacaagatcccggaaccggttaagtgccggactcgtcatcttcagctgcctgtgataaatggtttcctcctgccttcgcacagcgtatttcagctcaccttcaatctcctttgccttaaacatcttattcttgtgataatcctgccctatgatcagatatagaataaatccgacaatcggaataaaataaagcaaaagcagccaggtccatactgcctgcggtgatcttctttcaaaaaatacaataatcagagataaaagaatattaatgataacgatattcttcataataaaatgaaaaaccatcaccactgtgttccatattgtctctgccattcaactctccctttctcttaatcaacgtgaaaatattattgctcactatactccatcacattcttcggacagcgcgttactgttcacacgatgtgcgaccagcaacgcatctcgccattttaaatcgcctttggcgatggggcgagatgcattcaagtcaaaacacgcatcctccgtgtcaatcagccgagtgattgacacgggagtgaacagcaacgccagcgctgctatctttctgcaaacaataataaaccaccataatacatagtatactcggtttacgtcttaaaagtaaccccaaattgtaaaattgtcccctgtctgcttgcactttgtaataaagaatgttacaatattaaatgcgaattaagcggaaaatagtatataggagggttttatcgtgagtacacctatgataatcatgctcatcgtcctcgtagttctcatcggggtttgcgtagcactctatttcttcggaaagaaagcgcagaagaagcaggctgaacagcagcagcagatggacgcagttgcgcagaccgtcagcatgctcattattgataaaaagaagatgaagctaaaagatgcaggactcccggccgttgttcttgagaatacaccaaagtatttaagacgttctaaagtaccggttgtaaaagcaaaggttggaccaaaggttatgactctgatgtgtgatgtaaaggttttcgaagttcttccggtgaagaaagaagcgaaagtcgttgtaagtggtatctatatcacaggcattaagagtgtccgcggtggtcttgatattccagagaaaaagaagaaaaaaagatttttctcaaagaaagaaaaataaaaacaccattaaaataagttcagtcaaacaattcgactgaacttatttttttaattctttttcttttgttcttttctcactgcttcatattttttcagctcatccaacgcctggccacccatcagatacaggatcactgtattgaataccgtcatcagcccgatcccgacatcgcccagatcccatacaaatgtgtacgctgcgattcctccgatgaataacatcacaagtgcgagcactttatatgctgtctgggatgcccagttgtctccaaacagataagctacattacttcttgcataaaacagaattccaagaaatgtagaaaaactgaacaggaacagcatcactgcgataaaaatcacccctgcttctccaagatgatatctcatcgctgtctgaagcagttccattcctgcaagtccctcaatctgatcctgtggaacaagcaacatgatcatcgctgtacagctgcagattacaattgtgtcgataaatacgcccaatgcctgaacaagtcctgcctttaccgggagatcacactctgccgcggccgctgcacatggagcagatcctgaaccagcttcatttgagaacaatcctctcttcactccattcatcaaaacagctccaaaaccacctgctgccacctgacggactccaaatgcttcctcaaaaatacgtgagaacacacccggtatgctggacagattcgtaaggatcaaaaatactgtgatcaggaaataacacactgccataatcggaacaacaacatccagaacctttactgttgcattctttcgaagcacgatcactgctgccagaaccaccaaaatcacagttgtataaatcggtgggatagaaaatgcattttcaaacgaagacgtcactgaattactgatcacctggctaataccacaccaacagattaatcctgaaattgcaaacaataccgcgatcactgaatatctctttttctttccttgatgttcttccatgtagtgatggatataatatgccggacctccgcgatatcctccatacaacggatctttttctttatgaagctgtgcaagtgttgcctcaacaaatgctgtggaagaaccgatcagtgccgtgacccacatccagaacactgctccagccccgccggctgagatggctgcaacaacacctaccagattccccattcccacacgggttgctgttgatacaatcagtgtctgaaaattagacaacccatcctctttcccttttttactattcaacgatcttaccatctccggaaaaagacggattggaagaaatcttgtacggattgtgaaataaattcctgttggaatcaacagaataatcagaagtgatattcccacacttccgccgcctggaagcggtatctgaaacagatcgccccataaaaacgaatatactttctcgatcagtgttattaccatcatcttatcctctcattcttatctttttcatttttccgcctgcttatccaaaaatgcctcggcgttcttgtatcttaactaagcactgaaaactttccactgtccttggaaacaatattcatccgtatcttacagtctgccatcggttcatgatttacgtccagttcataatcaatctggaccgctatcttatcttcttcaaaatcaacctgaagatgtctcgtattcactccgatcagcatctgtccataaggcgtcttataaaatgtctgattctttttatttttctcaaagatcatatgagagtttgaaagaccgcttttcacgatctctacacattcatctccgttaatcttaattctgttcttgatcactccagaagttccttctacaacttcctcgtagacaatataatgttttccgttcttcaaataatacgttgctggtgtcacaacttcgattgcttcgttctcatcttcttctacctccggagtgaccgccacaatctcctcatgcattccggaaatacttaccaatacatcttttgtcataaatgaattctccatagaaaagaatcaggaaaatttcgttccgtcagtctttccgcaaccaacgtacaagcacgaaataactttcctgattcagaattactaattaatactcttcaatatttactacattcgttgtcggaacatcaaatggcatcactgtattcgcaaacttcctgaacttctcagccgcatcgctgacatagaaggaatactcactatgatgttctgtcgtctcatcattcgccatctcttcctcttccaacagacgtttcagatccatcgctgtctcatatgcaggattcacaatctgaatcttatcccccatatattctctgatcttagatctgagaagcggataatgcgtacatccaaggatcatcgcatcaatatctgtattgcgcatggattcgagataatactcaataatctctcttgtcacaatatgttctttgaatccctcttccactaacggtacgaaaagaggacaggctttctcgatcacttcaatcttaggattcattccctgaatcactttcgtatacattccactctgaaccgttgcttcagtacctaccacaccgacttttccattcgttgtagcttctaccgctgctctcgctcccggaatgactactccaatgatcggaaggtcaaactcatccttcactgcatccaatgcaagcgcactcgccgtattacatgcgatcacaattgctttcacctgtttcgtcctcaggaaacggataatctgttctgaaaaacgaatgatcgtgttttgtgatttactaccgtatggaacacgcgccgtatccccaaaataaacaatgttctcatacggcaattgtcttgatatctctctcgctacagtcagtcctccgactcctgaatcaaacaccccgatcggtgccatctttttattcttcatgtccgtcaaagttctccccttaatctatccttatcagttatttttatcttatcgcagatacacaattcagccatgtaaccttcttacaaaggctgcatggctgaatgttatatttcattaccagtcatctggtaaccattgctattctattataataactcaaagtgatatttgcaatgctatttcacatttttacagagcaagagtcttcgctacatcgtactgatatgccggaattgtcttcttcatagcaagtgcttcttcaatgtcaaaatcaataaactgtccgttcttgtatcctacaacacggtttgtctttccctggcaaagaaggtcgactgccatagctcccattgtagaagcatatactctgtccttacatgtcgggcttccaccacgctgcatgtgtccaagaattgttgctcttgtctcaattcctgtagcatcttcgattctctttgccatattgatagaatctccaacaccctctgcattgatgatgatgtagttcttcttaccacgcttcttattctcaagaatatctttgatcagtgctttctcatcatagtccttttcctctggcatgagaattttctcggctccgttagcaataccacaccacagtgcaagatatcctgcatcacgtcccataacctcgatcacactgcatctttcatgagatgtagatgtatcacgaaccttatcgattgcttccattgctgtgttaacagctgtatcaaatccgattgtgtaatctgtacatgcaatatcaaggtcgattgttcctggaataccaattgtatttactcccagatttgccagcttctgagctcctgcaaaagatccgtctccaccgattactaccagtccgtcgattccgtacttcttacagatcgcagctgccttctgctgaccttcttctgtacgcattgtcttacaacgagctgtctggagaactgtaccaccacgctcaatgatatcagacacgtcacgtgctgacatatcaatgatctcttccttcagaagtccatgataacctctgcggattccgcgaaccttaagtccttttgcaagtgcacgtcttactaccgcacggattgctgcgttcattcccggagcatctcctccacttgtcagaacaccgattgtacggatgctgtcttcgatttcatcaagatatttttctttgtcgactgttttattttctgccatgttttagtccaccctttctctgaaatgtctgattactgccaaaaccaatcattgtcaattttttatcaactccgccaatattctaccttatttagaatatgttttcaataggtttttccactacttttactctcttctcgccgaaatgattcatcaatctgcttaaaatctgttcatttataccgatattcctgtttttcggcagttttttcaccgcacgttccttcgcacagtagatcataacttcatcatctccgtctgaatctgccagatatccatagacaatctgttcctcatccagaaatgtcgccttatcaggaaactgaatccacaattcctttttcgtccgttcaaacggaataattttctcacagatcatcttactcggcttatcatcttcttccgaaactcttccgcgaacaaataccttgctatctacttccagataatctctgttcttctcataatctcgcgggaacacaacaacctctaccgttcccaaaagatcttctaccgtgataaatgccatcatctgattcgtctttgtgtgctttatggtcttctctgtgatcattccaccaataatttctttcgccccatcatgcacttttgtatgaccggtctcttcatccagctgaaagtccgccgttgtcgcagaaatggatttcttccacttctcctcatacgcctcaagcggatgtccgctgacatagattccaagtacttctttttcaaatgcgagaagtgtttctttggagtattctcccacatcaggcatcctgatctgaaattcttctttctgatcttcactcaccagatcaaacaatgtcatctgtccaaccatagagttctttttttcttgagttacatgatctacgatctgtacatagatactcatgaactgttttcttgttccgccaagcgtatccaatgcccccgccttgatcagattttctatcgtacgtttatttaatatgttctttgctgaaagacgggtaatgaaatcttccaggttctggaacaacccaagctcttctctgtcttccacgattgctttgatcaccggccttccgatactcttgattgcagcaagtccataacggatatccccgccatctacagagaagtttgcttcacctttattaatatccggcggcaggatcttaatattcatctggcgacatgtataaatatactcagataccttagacggattatcaatgactgatgtcataagcgctgccatatattctaccgggaaataatatttcagccacgcagtctgataagaaaccactgcatatgcagccgcatgagacttattgaacgcatattttgcaaaatcgatcatttcatcataaatcttatttgcagtctgttcatcaattccattctttatacatcctggtacgcctgtctcctcatcgccataaataaagatcttacgttctttctccatgactgccgcctttttctttgacatcgcacgacgcagaaggtcgcttcgtccaagtgagtatcctgcaagatctcgtacaatctgcataacctgctcctgatagacgatacatccataagtaggggcaaggatcggctccagttgtgggcaatcatatgtgatagaagaactgtcattctttcctcggatatactgaggaatgaaatccatcggaccaggacgatacagcgaaattccggcaataacatcttccaggttatgcggcttcagttccttcatgaaccctttcattccagcactctcaagctggaacacaccatctgtcttaccggttccgatataatccagcaccttttgatcattgtaatctatctgattgatattcagttccggctgctttcttcttgcaagcagcactgcattctgtatcacagtcaatgtacgaaggcccaggaagtccattttcagaagtccaagttcctcaagtgttgtcataataaactgcgttgtgattgttccgtctgctgccctcgaaagaggtacatactcatcaaccggcttctgacagataacaacaccggcggcatgcatagaacaatgtctcggtagtccttccaaacgcttcgccatatcgatcagatttgttaccgtctcatccgtatcatataactttttcagatccggattcattttcagagctttatcaattgtgattccaagctcctgcggaatcattttggaaatagaatccacataagcatatggcagatccattacacgtccaacatcacggatcacacctcgtgctgccagggtaccgaatgtaacaatctgagccacacagtcttttccatattttcttgtaacgtaatcaataacctcctgacgtctctcataacagaagtcaacgtcgatatcgggcatggatacacgttccggattcaggaaacgctcaaacagcaactgataacggattggatcgattgtcgtgatctcaaggcaataggacacgatacttcctgcagcggatccacgtcccggcccaactgagattccgtgatcttttgcgtatttaataaaatcccacacgatcaggaaataatctacataccccatctgatgaatcgtttccaattcataagccaaacgctctttcaattcttccgaaggatcaccgtaacgcttttccaatccttcatagcaaagcttctgcagatattcccaggaagtataaccatccggcacatcatatttcggaagttttgttacaccaaattcaatctcgacatgacatcgatccgcaatcttctgtgtattctccaacgcctgtttcgcataagggaacagacgtagcatctcttcttctgacttcacataatactgcccgccgtcataccgcatacgattctcatctgaaagcttctttccggtctgaatacaaagtagaatatcatgtggcttcgcatcttctgcatatgtataatgaatatcattcgtagcaaccagctcaattcctgtctcttcagacattttgaatagctgttgattgacaagtccctgctctggtattccatgatcctgcaactccaggaagaaattcccttcgccgaaaatttcctgatactctaaagctgtcttcttcgcctcttcatataatcccttcgtcaggaatcttgccacctcacctgctaggcaggcacttaaagcaatgatacctttatgatacttgcgcagaagttccttatccactcgcggtttatagtaataaccttccacaaatcccttcgaaacaatcttcgtcagattcgcatatccttcctcattttctgccagaagcacaagatgataatatctgtcatctcctcctgtgatctcgcgatcaaaacgagaattcggagccacatacacttcacatccaaggattggattgattccctgcttcttggcttcccgatagaaatcgatcacaccatacataacaccgtgatctgtaattgccgcactgttcatcccaagttctttgaccctggacacgtattcttttatcttattcgatccatccagcagactaaattctgtatggacatgcaaatgtgcaaaactcatagttcacctcaatgatcaaattttaactaagaaaagggaaggctctgacttgatacacaggtcagaatcccttcccttcattttacactctttatggaaattttaaaatgttaaatcttatttatttccaccatctatcataaactggatcagcttatctgtatcttctttctcgtaagcgataacttccagctccggaatctctccgttagagaaaatgttagccatagatacatactgggaaagtttagacttcaggttcagtctgtctccctcacctgttactaactctactcttcctttacaagaatctactaccttaaaaaatccttcaacatctgtaatattctgaactttcattctaaatacccctttcttttaacaatttaattataactttacttcctaaattcatctgggaatgatattacctatcattttctcattcctaatgttattataacgcatttaaagcatattacaagtaggaagaatcactatttttctcattttcagcatataaaatctcacacttttttctatttgaaacaacacttcctacaagtcatagtcactttctctaacacataacggttcgtttgcagattgcttttacaaactataaataccgtcctctttgattacgattttcttctgtttcaagagtcttccaactgcacgtttgaacgcagctttactcattcccatctctgctttgatgcgctccggatctgctttatctgtgaatggaagtttacccccacaagtctcaatacattccaggatcaattctgcatctttgtccatctgctccggaatcttgccacggacactcagatccagttttccatcctctttgactgctgccacacgtgcttcaatctcctgtcccggatacattcttccatacatctctctcttcggaatcaatgcagaatacagattatctactgccacgaaagctcccagatcacgattcacctcataaactgttccggttacaatatcatcctttttataaggagagtctgtctgcagaagatgatagatcttcattgtcgcacaaagtctctcgctcttatctacataaagacttaccagacagcggtcgcccttctctaccttctctgtctgttccttaaatggaaggaacaggtccttctcaagtccccagtcaagaaaagcacccattctgcccacatctgctactgtcaggacagccagctgtccaagagtgatctttggctcattcgttgttgcgatcatacgatcggaagaatctttatagaggaatacctcgatcggatctcccagttcgattccgtccggaacctgtttctttggaagaagaacacgctcctcgtcacttccaagatatactccaaaatctaccagctttactaccgtaagtacctgttttactcctaatctcatcttttctccattctgccgctggcttacgcggcccattttttaatatgttttctataccttaaggtattttctatgctgttgtcaatcgaatctcatcaatttctttgattctttatttgatatttttttaacatattctttctatgaattgatttacctttctgaattatgtataattacttcaatgtgagagcaatctttctgcctacagcctgtctgaggcagtatttttaagagaggatattagtatgagtgcacaaaatcttactttattgacagacctgtatgagcttactatgatgcagggatattttgaaacacaggaaaatcagactgttgtattcgatgttttcttccgtgacaatccgaacaaaggcggatattccgtcatggcaggactggatcaggtcattgactatattaaaaatctgaatttttcttatgaagatgttgattatttaagagggctcggattgttcagtgaggattttcttcattatctgagcggatttcattttagcggagacatttatgcgattccggagggaagcgtcatcttcccaagagaaccgcttctgaaagtcgtagctccgatcatggaggctcagcttgttgagacagcaattcttacaattctgaatcatcagtgtctgatcgctacgaaagcttcccgtgttgtttatgcggcacaaggagacggtatcatggagttcggacttcgccgcgcccagggaccggatgcgggactgtacggagcaagagctgctgtgatcggtggatgcgtcggaacttccaatgtactcgccggcgaaatgtttgatgtaccggttatgggaacgcatgcacacagttggatcatgactttcaaagatgaatatactgcatttaaagaatatgcaagattgtatcctgatgcatgtacactgcttgtcgatacttatgacacattgaaatccggtgttccgaatgcgatccgtgtttttaccgagatgcgcgaagcaggcatcaaaccgaagagctacggtatccgccttgactccggtgatctcgcttatctttctaaaaaggcgcgtaagatgctggatgacgccggattccaggatgctgtcattgccgcttccaacgacctggatgaatttctgatccacgatctcaagatgcagggcgctgcaatttcttcctggggcgtcggaacaaaccttattacatcaaaagactgcccgtcttttggcggtgtttataaactggccgctattcaaaacgcagatggagaattccagccgaagatcaagatttctgagaatattgagaagatcactaatccgggaaataaaaccatttatcgtatttacgataaagaaaccggtatgctgcgcgctgatctcatctgcttcgctgatgaaacatttaacacagaggaagaagatctgcttctctttgacccgaatgcaacatggaagaaaacacttcttccgggtggaacctacacaatgcgtgaactgcttgtcccaatcttccagcatggagaatgtaagtatgagtccccatctgtaaaggagattgcagaattctgtcgtcaggaaaaaaagacgctttgggatgagacaaaacgtctcttcaatccacataaggtatatgtggatctttcccaaaaactgtacgatacaaaaaccaagctgctgaatgaagcacatcattaattactgtcactatataacgaaatggagttttaattattatgaaataccaagtgattgtacttgatctagacggtacactgaccaattcaaaaaaagaaataacgccccctacaagggacgctctgattgaaattcaacagaatggaaaaaaagtagtcctcgccagcggtcgcccgatcaacggtgtctcacctctggcagaggaattatatctaaaagaatacggtggattcatgctctcctttaacggtgcgagaatcacccgctgttctgacaatgcaattatttataataaggttatcccacaggaagtcatccgtccgatttacgaggcggtaaaagaatatcctggattggaccttatctcttatacggataaagtaatcctctccggtattaaaagtaatgaatacactgagaaagaagccgccatcaacagcatggagatctgtccggttgaggacttccctgccgcacttgatttcccggtcaataaaatacttatcccaggtgaaccttccatcctggaagacctgatgccgaagctgcagaaacaataccacggactgctcaacatctaccgttctgagccattcttcttagagatcatgcctcagaatatcgataaagcacactctctgcagaagcttctgaacagtatcggtctcactgccgattccatgatctgctgcggcgacggcttcaatgatctgtccatgatcgaatatgccggtcttggtgtagcaatggggaatgcccagccggtcgtcaaagaatctgctgactttatcacaaagtcgaatgatgaggacgggattcttcacgttgtaaatctttacatgagagattaggccttctctccggaagctgcgcaagaatcacagccgcaaatacaagggcacatccaaaaagttcccttggagacaaggtttctccaagaatcacccagcctgcaagtactgaaaatacagactcaagacttaacagcagagatgcaactgtcgggtctgtatttttttgtgcaacaatctgcaaagtatatcctaccccacaagacatgattcctgcataagcaattggcttccatgcctgcaatatagaataaatttccgggtgctcaaataaaattgtcggtatcatacataagattccacaaacaaaaaactgaatacaggacatcttcactccgtctgcctttggtgaaaaatgatcgatcacaagaatatggaatgaaaaagcaacagaacccagtaaaatataaaaatctccttttgcaatggataatcctgatgtcatacacagaaaatacattccgatcactgcaagtaccacaccaatccatactttaattccggcctttttgccaacggccagccccaggattggaacaatcagaatatataatgccgtgataaatcctgcttttcccgccgttgtatattgtatcccaatctgttgcaaggaacttcccagcataaggaaaaatccacaacaaataccaccgatgataagtgttttcttattttgtataacttcttttccttgtgatatctcctcctttctcttcttatccaatacataaatcaccggaatcaatacgattccaccaagtatacttctggcactgttaaatgtgaatggaccgatgtagtccatcccagcactttgtgcaacaaatgctgcgccccaaataagcgcgattatcagaagtattaaattgtttacatacctctttttcaatttttttacctctttttcaatttttagccactctttagtatacaaaaaaatctgccgattggcagatttttttgattttttcttattatttttcttaatagtgcataattaccggatctccaacctggattaactcatacaatttcccggcatccgaatagctcatattgatacatccatgagaacctctgtaggtatatacatttcctccaaaactgctctgccatgttgcatcatgaaaaccaacaccggaatacgttacacgcatccaatattttacaagagtttcatactctcttgttccatccggtcttaaattaccgcgcagtactttattctgcattcgttccaaaatcgtataaactcctgccggagtacttcttccgcctttcggaagtccggtcactacatctgctgacattaaaacttctccgtctttgacataccacattttctgattcgtcagatcgacttctgcataagtggagccccaatcctgcgcaccatgcgatgccgcagtctttccttccacataaaccggctctcgacttattgtttctccgctttcaacattcgcgagaagtgtctcatactctgccttttcattaatctcccaaccgtaagttccaccggaaacttcggttgctcttccatccggtgtagtgaattgtctggtctttcctgcagtatcatactgctgtgcaaactgcgtcacccattcctgtataagttccgggtgaaatgtcaccacataattctcatctactgtcacccactgtgaaataattgttttatcaaccacaaccggtgtatcaagtcccatctcataagttacactcgcattcaggtatgcattcatcgcatcgcacgcctgctgaacttccaatgactcctttgtatatggcggctgtacataacatcctgcttcatcaagattcaactgctcttgcagtccctctatcgcttggactaccgctttcttcaatgcatctgcatcgattgccgtcccttccgtaatgtctcccggaacaaacttttctccgttaaacaccggcatagaagatatcggctgtacctgttctgttgtcatagctgtcagacttgcaatcttcgcatctaatgctttctcatcataatctgcacttgccgtgatggacaatccttttccctctcccgaccatgctgccggccacagaaaaacggactgctcctttaatagtttatctatcactccattctctttatattcaacagagatctcttttcctgtaatcatatcagaaagtcccgcatgttctgtaatcttcaattcatacttcttaacttctgatttcagataatctgccacatcttcttccttagcatatgaaaaatctttcccgttaacctttgtatttggaagaaaatgactcataaaatacaaagcggttcctatgtaccctaaagccaagattcctgcaactattccaaggctaatccataaccattttttcttgttgtcccccatcaaacactttctcctttgtaattccttctttctaatcaatcagatcattctgaaatctcgacaaatgctcatacggcaagatcagtcttcctcgaaacaatccacacccgtcattgatcaaactgttattcatcgctgcaaacatatttacatccagctttgccagatccaatcccaacagcttcattccgcgctcatacgcctcatcaaaataaatgcactcacctcttggaatcgcatttcttctggcgcgctctttctcttgttttttctcatatcccagatggtttgccggcccaatctctgcaatatcatccatttgctttgtacggatctgaacctcaatataacttcttgaacagttatcatagaatgtaatgtgcagtgactggtattcatccggctggctgtctgaaatatagtctctgtaatatggtctgacattgtcatccatgagtggggaatgactttccatcacaccatttgccggctccgctgtaaaccctctttcctcaagaaagcccggtagtacattcgctatcccgtacagacattccagttctgcgatctgacgctcttcttcattttcataatgacattttggcatagaaatcacaattcgatatgcgatcagatcacgaaagcagctaagactgcgctttaactctgccgttgtcggatactttccatattcttcgtaataatctgaaatatacttgacaatataaccattaaatttctcttccgcacggatcaacgacttgattcttccctttactgtaaatgcaagatatggatattcttttgtcatatatttatagaattcccgaacctgctgtgactgggtcgtaaggaattcattatgttccaaaagttctctgatctgaatcaggaaattacaatgtatcaaatcaatttcattttttgtctttcgtgcatctccccttagatctgtaatgtaattctgcagcaccttaaaaatggtatcgcccgaatacagataatcatttaaagttatcataacgtatccctccacgaaaatgtatctctgtgtttttcattgcatatttcttatcagcacgccaaacatgatgaccttatttcatctattataacaatccgatgcgacaatcgccagtcatggagctacaaatgatactttttttgatttttttagagaaattatataaattttatctaaaaatcttgaaatttttataaacaatcctataatataagtgggttgaaaaacgctaacatttatgttttctggaggtgtttgtatgattagttttattatttgtttagcgttacttattggcggatattttgtttatggaaaggtggttgagaacacattcgcacctgacgacagagaaactcctgctgtcagaatcaatgacggagtagattatgtcgttatgccgcaatggaagttattccttgtgcaattacttaacattgccggtcttggacctatttttggtgccatgcagggtgctttatggggaccggtcgtattcctttggattacattcggtacaatttttgccggaggtgtgcatgattatttctccggtatgctttctgaacgaaatgacggagcatcgatttctgaggtatgtggaatctatcttggaaatgtcatgaaaaatgttatgcgtgtattcagtgtagtacttcttgtcatggttggtactgtatttgcagtaggtcctgccggcttgatcgtcactttgcttgggaacaaaggtatcaccggacttcttgcaaatcctgaattctggctttggattattttgttatattattttatcgcgacctttatttctattgataagattatcggacgcatctacccgatttttggtatctgtctgatcatcatggctcttggtgttatcatcggtatcttcacaaatccgaattatacaattccggaaatctggagccactttacaaatatgcatcctgacggaaaaccaatctggagcttcatgtttatcactgtagcatgtggagctatttctggtttccattctacacagtcccctctgatggctcgttgtatgaaatctgagaaacagggacatttcgtattctacggagcaatggtagccgagggtgtgatcgcactgatctgggcagccgcaggttgtgcaatttacaaagtaaccggtggtctaaacactggattaagtgagattcttgcaaatggtcagtcagccgctatttatgatgtttgtattaaaacaatgggaagcatcggtgtagcattggcaatgatcggtgttatcgtatgcccgattacttcaggagatactgcattcagaagtgcccgtcttgtacttgcagactggttcaagatcgatcagaataaaatgcagaaacgattgattctctgtgtaccgcttctggcagtcggtgcttttgtaggacatcttgattatgccattgtatggagatatttcagctggacaaaccagactttagcaatgatcgttttgtggacagcaagtatgtacctgttccgtgagaagaagaattactggatcacagcagttcctgcaacatttatgagtgccgtttccatgacctatttcttctgtgcagatgaatgtctgggattctctacagcagttgcttatcctgtaggaattatcctggcagcattgttccttggaatctttatctgggcaacaagaaaacctgccagaaaacaggcttaagactataggactgtgaaaaacagacagacatcatgtttttcacagttcttttaaaatatacaaatgaaatgagatgatattatgtttaaaccacaacgacttggaactgtaacaatcccggatgctgaattaaccactgacaaaaaaaactgcaaaaaaataggtccttgcggtgttggggaaaaagcaatttatttaaacagtttttattttgacagatgttattacataccaatttcttccatagaaagaatatttaaaagaattgccatgagcaaaggtggttttacaggaaaaggagcatttggaacgttatcctatctcgtagttgtatatgaaaatggaaaagaaaaacaatgtaacttcaaacatgaagaagatgtggatcgtcttttggcttatattgaagaaagatttcctcagattccgctgcacagcatagaagccgagcgaaaactggaagaaaaaagaaaatggctggaagaaaagcaacgcgaacgcattcttccggaagaaatcaaaaagcggcttaccaagcttgaacgcgcagaaaattatcttaaaaagcaatccgattactacatggatctgagcctgtcggcgaagaaaaagagaacctatgacagaagcaatcccgcttataaatgggtcgctcttgctgttgtaatattgggcatcggagcattcctttatggaatctactcccttctgactcatgccggattcggtatgtatttcctgttatttggattggcagcaatttttctgttcgccggagcgaatgtattgccaacctccaaaaacaataaaaaatatatcgaaaatcagctggaacgatccatccagcaaatggaagcctatatccagaaatatcctgactttccggttccagcacattacgcacatccgttcgtattaaagagaatgcaggatatcatgaaggatggccgtgcacaaacgattcctgaagcactcacggttttaaaagatgatttgaaagctctgaattctaatgtaacagttgaaaaagaagagtatgatgaaatcgttgcaatcaagccaatgtttctggtaatggattataaatagtttttcacctgatttttgccctctcaaaaagaatagcagctgttctcacaacacacttgttagacagctgctattcttttccacattcctctcattttataagaaagttattcacattttactctttaattgttcccttttttacattttcctggataatctgatctacaacttcaaatattttttccgatccaagtctcgtcttcctctgacgaccataaacctgatctgcacatactccatgctctttccaatcatttccaccattgctgttattcagcatcagcggctgtagattatccattgcatgtgcgaacttagattctgctgtttcaaatgcctcgaactcatcaaaaagagaaatcagctcttgtttctgatcttccggaaggattgaaaaaattctttccttcgccgcatcttctcttgctttctgagttttcaaaccttctgtatcatatgcatacgtatcacccgcatcgatctccacaatatcatggatcagacacatcagcattacctttgcaatatccaccgattcgtttgaatgctctctgaaaagatatgccatgatcgccatatgccatgcatgttctgcatcgttttcccgtctgccatgctctgagagatgtgtctgtctcagaatatttttttccttatctatttccaatgcaaaatcaagctgtcgtttcaatctttcatccatttttctctgtctccttgttctaaacttcattaccttaaggtggaaattatcaacctccgcattttgccgtaccgctcaattcaaatttactatactacattttttcacttccgtaaaacgcaaaaagcaaactccaaagaatttgctttttgtattatttcgttctcagctattctatttcagttcatctaagatagatgctccgatcgttccctccggcatctttacgtcgaaattatctacaatcgttgcaccgatcactgcaaatgtatctgaatccggcagttttccgtatccttccatagatggagaatatgcaaaaaacggaaccatttctcttgtatggtctgttcctgtgtgcgtcgggtcatttccgtgatctgcagtaatgatcagaagatcatcctctctcaatccaccaagaaattctcctaatttcacatcaaatcgttcaagttcctctgcgtatcctttcacatttctgcggtgtccccacaatgcatcaaaatccacaagatttacaaagcacaaacctttgaaatctctttttgaaatttcgatcgtctgctccattccatgaacagaacttttggacttatttgattctgtcagaccttctccatcgaaaatatcaaaaatcttaccgactgagatcacatcatatcctgcatctttgagtgcattaagtgctgttcttccgtatggtttcagcgcataatcatgtctgttacttgtacgcttgaactcaccttttttctttccaacataaggtcttgcaataacacgtccgactttccactcatctttcatcgtaatatcacgtgcgatctcacagcagcggtaaagctcatccagtccgaatgtctcctcatttccacagatctgcaatacagaatctgcagatgtatagacgatcatatgacctgttgcaatctcttcttctgcaagttcatcaagaatctccgtgccactggcactcttgtttccgattaccttatgtcctgttctcttttccagttcgtcaatcaattccttcggaaatcccgtctctgtaaatgtcttaaatggcttcgtgatatgaagtcccatcatctcccagtgtccggtcatcgtatcctttccggtacttgcttctttcaggaaagaatagtatcccatcggtctttctaccggtgccacctgtttgagtggatgcagattagcaattccgagtttctgaagattcggaatatgaaattcatccacagactcagaaatatgtcccattgtatctgttcctgcatctccataatctgcagcatccggcattgctcctgcaccaaaggaatcaattacaattgtaaaaattcgattatattttttcataaaagtcacaccccattacatgtttacaacgacctttgtaacaagttccttaaatgattttgctacacggtctgctgtctcctgtacttctttatgattcagttccacttttgagattcctgctgccatatttgtgatacaggaaattccgcagatttccatacccatatgacgtgctgccatagcctcacatgctgtgctcattccgactgcatctccgccccagctctgtgcgagtcttatctctgccggtgtctcatagttcggtcctgtaaactgaacgtaaacaccttcctgaatctcaacgccacactccgctgcacacttgcggatcacatcctgaagacgcttgctatacacttcgctcatatccgggaatctcgttccaagttcatctatattcggtccgatcaacgggcttggaactcctgttgtaatgtgatctgtgatcatcatgaaatcaccggctttataagatggattgcatccacctgccgcatttgtaagaaggatcttcttcgccccaagcattcccatcagacgtgtcggaagaacaacatcagacatcttatatccctcataataatgaacacgtccctgcatgatcacaaccggtgtatcctctacataaccaaatacaaaacggcctttatgtccctttactgtagaaaccggaaatccttcaatctctgtataatcgatggtctgctcaatcttgatcccatctgcgaaatctccaagtccggatccgaggatcagtgctacttctggtttaaaatcgatcttctttcttacactttcaagacatgtaattaatttcttatacataattttcactctccttttctttgttttctgaacttgaaaaccggtaacatttcgtgtaaatacttatgcgccataaacttccctcattatccgatacaatttatcttttacataatcttccgcaaaagccacatctgctgcattcttcatcaaaagatagatttcatcatcttggattccgtatgtgttttgaataaattccagttcctttgtcattgttgtatcactgaccgtacgattgtccgtattgaccgttacttttaaaccgccattcaagaactctctgatcgggtattcctccggtcctgctactgcttttgtctgcagattactgattgggcacatctcgatcccgattccttttttggcaagttctttgatcagatcactatgtcctctcattgcaattccatgaccgattcttcttgccccagcttccacggaatctatgatgttctgagcacttccacattcccctgcatggattgtaaatggcattcctatcttatgggtattttgaaagagatttttaaactctgacataggataggaagcttccgcacctgcaagatctgctgcgcacactcctgagccaagatattctctcgctgtacgtatcatgcgccagttcatttcttcgctgtgatgccgcatcgcacatacaatcaggccgaagtcaattccaaactctttcttacctctttcaagacctcttaggactgcttcgatcactttgttacaattcatatcatctgtctctgaaagaagaggggcgaaacggatctcagaataaatcacattctcctgtttcatacttctaagcacatcataaccggcttcttcaagaccttcttcatcttgtaagcattgccccggcagatcaaacttttccaggtattctgcaagactggtacagtcatttgacacactcagttcttcttttcccacctgtcttcccaatctcttttccacaaattcccgactcagtgatccgtccagatgacagtgcaattccacctttggcaattttataatatcttcccttgtcattgttaaatcccccttccttcgtcagcttttaattcgtatatattataccaaatttaatggtccaaacccaagaggcatcagctcttctaaagtataaatttcatatcgttctttatccactgcaagaatgatctggaatgtcttcggattacagaattccatcatgacctgacggcatacaccacatggcgcagtgtattccgtcaattttccatctttgccaccgacaatgcagattgcctgaaaatcacgaacaccttcgcttaccgctttaaaaaatgcagttctctccgcacagtttgttggtgtataagatgcattttctatattacatcctgtatagatctttccgctctttgttaaaagcgctgccccaactttaaaattcgaataaggtgtataggaaaacttaagttgctcaatcgctgtatcgatcaatttctcaaccataacctgttccatcacagcctcctcttttctttcatatgctactacctgttttcttatttgttttcctggtctgctttgatcaatttgcgaattgcttcaacggctacctggattgccatatctgtatcacgaacaactggattcgcaagaccaagtttctctctttcctgatttgcaacaacaagaaaacaagaacctgctcttgctcttaatttagatgcacagataaacattgctgctgattccatctcagatgcaaggcatcccatcatcttccatgcttcccatttattgataagttcatatcctaccggcattttctctggctcatgctgtccgtaaaatgcgtctttagactgaacaacacctgtataatgtgtgaagtttttctctttcgctgctgcaaccaatgcatttgtaacatcaagatctgctactgcaggatactcgatcggtgcgtattctttggatgttccttccatacggatcgcacctgttgcgattacaacgtcaccacttttaatctctgtctgcattccgccacatgttccaattcttacaaaagtatctgctccacatttatacagctcttccatagcgattgatgcagacgggccaccaatacctgtagatgtaacgcttacctttactccgtccaatgttcctgtataagtaatatactccctgttatctgctaccaaaaccggatcatcaaaatactgtgcgatcttaacgcaacgttttggatctcccggcatgatcacataacgtccaacttctccttttgctacctgaatatggtattgtctgctcggatcttctgaataatttttcataattttttcacctctctaccacttcatatcttatgccattgagggcacaactaccttgaacagtacctgtagaaattcttgacttcttttaatattactttactctaatatcttgtaaaactcaagctacctattcattgcatgaaataaaactcgacaaactttcaataatcttgttcgaaagtcccttttattaaaaaaaggggtagtctcaaaacaagaaactcgttataatagggggcagaaaatggatggaggaattcaaaatgaataatgtaattgagatgaagcacccactgattcagcataagatttcccgattaagagacaaaaatacaggaactgctgaattccgtgcgctggtagaagaaattgctatgttaatgggatatgaggctttaaaagaccttccattagaagatgtggaagtcgaaacaccaattgaaaaatgtataacaccacagattgcaggcaagaactttgctattgtaccaatcttacgtgccggtcttggaatggtaagcggtcttcaggctttagtcccgactgcaaagattggtcatattggtctgtatcgtgatgaggagacacatgagccacacgaatactactgcaaactgccaaacccaatctctgaacgtctgatcgttgttacagatcctatgcttgctacaggtggttctgctgttgctgctgttgattttatcaaacaacatggcggaaagaagatcaaattcatggctatcattgctgctccggagggcgtagaacgtctgatggaagcacatccggatattcagctgtacgtaggacatattgacagagaactgaacaaagatgcttacatctgtcctggacttggggatgccggggatcgcattttcggaacaaaataaatagattttgcaaaacaaaaaagatatcgaaacacacttacatttttcgtgtgctccgatatcttttttatctgtccctggccgaacagatcatttggcttatattttatggtatatttttacatggcagtaaaattggtttaatttctgatttcataaatctgagtcgcttttcaggcatgagtggctcagatttttcgagtaaactttaatgtcctggcatgacttatttaataaagcttacatgtttgcagatttcttcgatcgctttttcttttctctcattgaagactactttgttctcttcaaacaggttacgtccctctgtatcaatagatacgatcagtggtccaaactcttttacgcggcagtgccacagtgtctcaggcattccgaggtctctccactgagcatcaacgatttcctcaacttctgttgctgcaacaacagcatttcctgctgggaatacgcaatgaattgctccgaattctttacatgcacgctctgtgttttctttcattccaccttttccgatgatcacacgaactccggactcttttacaaattcatactcaaatttttccatacgcatacttgttgtcggtcctacagaaaccatttcaaatttatcattttcaagtggtctgatgatcgggcctgcatggaagattgctgcatcttttacatcaaccggaagctcacgtccttcttcaacgagtcttctgtgtgcaacgtcacggcaagttgtcatgcttccgttcagataaatgatatctcctgcatgaatatctttgagatcctcagctgagactggtgttgttaaaatcttttttccatcttttatttccagcattataatgtcacccccgaatgtgttgtgattgtgtagttaaggtccttatcaaatacaatgtgtccacgtctgtgtgaccagcatccaacattaacagcaactccaattgtggatggatgtcttgctgtattctcaatgtgaactcccataacagaatactttccgcccattccctgtggtccaagtccaattgcgttaatgccatcctcaagcagcttctccatagacgctgcacgttcattttcattgtggcttccaagcggtctcataagagctttcttggaaagtaatgctgctgtctcaacagatgtagcaacaccgacaccaacaagcagcggaggacatgcattcaatccgtaagatgtcataacatcaagaacaaattttgtaactccttcgtatccttcgcccggcataagaaccatagcttttcctggcagtgtacatccaccacctgccatgtatgtatagatttcgcactgatcactgtccggtacgatatcccagaatactgtcggtgttccttttcctacattctttcctgtgttatactcatcaaatgtctcaacactgttatgacgaagcggtgcttcaaatgtagcctttacaactgcttcctttaagagtgcttccagttctccaatgagtgggaagtttgttccgcattttacccagaactgtaatactcctgtgtcctgacagcttggtctgttcagctcttttgcaagaacctggttcttctgcattgtctgataaataacctttgaaagcgggctgtcttctttttctgcaagctcgtcaatctttgctttgatgtcatccggcagtactttaccaatataggaaacaaagttcgccatataagtagtaagctgctctacctgtgcttttttatccatttttaggtctcctttcattactgctgcaatttccagtaactttgatgattaggttagttcatgttttatagtttcttttatatctcattccaacaacatgtcttcttacgggaagaatggaaatgcgattggaaggataatcatacttacaactgttgcaatgatgatcaatgggaatcctgcttttacatagtccataaacttgtatccgccggctccaaccaccattgtatttgctggcattccgattggtgtcgcatatgcgcaagaaccaccgattacacaagccatcaatacagctcttggatctgctcccattccctgtgcgattgagagacagattggaaccatcagtgctgttgttgctgtatttgacatgaagtttgtcatgatacaacacagcaggaatacaacaagtgtcaggatatatggagatgggttcgcacccaacgctccgattactttattagcgatcacttctccggctcctgtctcctgaagagcagatgcgagggaaagtgtaccaccaaacaggaagattgtcttaagatcgattgacttaagtgcatctttttctgagataactcctgtaagaatcagaagcagtgctccgattccaccggaaatacaaagcttgataccgattttatcttcgaaaatcattgccagcaatgtaaataccaggataatcagtgataaccactgtttccatttcggcacattatcgaaattctttgttgtatcaaaagctccgtcatccttcacatcgtgacttggaagcagtttgtaaccaattgttgcgtagaaaataattcctacgatcaggatcggcataccaacaattgcatactcgaagaatccgaattttagtccgatttcaccgagtgcactctgtgcgattagatttcccggtgcaccgatcagggaaagatttcctcccattgctgctgcaaatacaagcggcatcagaagtcgggatcttttgtatcctgattttgctgcaattccgataactaccggaatcagaactgctgcagttcctgtgtttgacaggattccgctcatcaatcctacgatcaccataatcgcaatgatcagcattctttctgtcttggcgaacttcgtaacaattcctccgattttattcgccattcctgtttcaaataacgcacctcctacgataaacattgctacaaaaaggattacgttactgtcaatgaaccctgcaaaggctgttttcacgtctaaaaccccagtcactacaagaccgatacagacaatcattgatgttactccaagcggtatcttttctaatacaaacatgattaccgcaaacaggagaaacagaagagttattgttgatggactcatatgttttcctccattcctttgtttctgtttttcttttacttcttaactttttcagctattatttttagcttcgctttaagtaatttccggccgtttcgattacctctctgctatggttgtattatagaaaatacaatcgaaaatgtacattctgaaaaaaatatggtactataagaaaaaactatggaaacctttagtacgcaataatttagatataggaggtttttacaaatgaaactgacacaactcgaatatttctgtgttgctgcaagataccacaacatcacccgcgcatccaaagagctttttgttacccagccttcggtatctaacgcgatcaaagctttggaagaagaattcggcgtgaatcttttctatagaaacaataataaactgactctgacaccggaaggtgaaaagttctatcaaaatgccgaagaacttttggctcatgcggatgctgtcagatctgaactgcacgaactccgtaagcagattacacctgtccgcatcggaatcccgccaatgcttggaaccatttacctgccggatatgtatctttctttgaaggaagaattccctgacgtagatttccgcctatatgaatatggatcaatcaaagcctgtgaacttgttctggaggagaaacttgacctcgcgattgtcaatgcagaacagtctgcgattgataaatgcaaccttcatattattgataatgaagatctgctcttctgcgtatcaaaggatcatccacttgcagaacaatccacgcttcttttaaacatgctgactgatgagtcattggttctgtttaacactgattctgttcaggttatgacactgacccgtcagttcaaggccgcaggagtaaacccacacattgttctgaacaccagtcagatcacaacgctgatcaatatggtaaagactaatcatattggctgttttttgtataagtctatggtggatatgtatcctgaacttgtcggaatacctgtctttcctgcaattgaacagcgcattggtgttatctggagaaaaggaaagtatcagaacgctgtgaccgaaaaggttattagatatttgaagaattattaatcgttatgccaatcaatttatttaacaactcattatttttaaaggcggatacattgtactgtacccgccccttatagattttaattctctttttctgccattttctttaagttctccttgcatttcccactgagaaaccgcattcagcgaataatacctgactcatttctatcttctattcatataagaaatcgacgacaacgtctgcaggtgcgccggacagatatctctgcatgccagtgatttcgaacattgcttcgcaaaatgttcttcatactgtttctccaatgcccgctttcgattcagactggaagaatgcagaagatacgcattatttgcaaactctgcgccatagaaatcatcttttgccccaagataattcggacatacttccagacaaagtccacatttcagacactttgctgccgaatactgatgatcatgctctttcggatctggatgtttccgaattccaaggtacatcagtgcttccttctggcgttcccatattacagatctgtcaacaatcagatcttccacaaccggaaattttgtaagtggttccagccttaaaatctctgtatcatctgtattaatgaacactccacatgccaatgccggatgcccgttgatcaccattgcacaacctccgcacattttctgcatacaaccacattcccaacggatttttctacattgttttcctttgatatcttccagctggtcacgttcatttaacttctcgagaatcgcggctactgtaattcttccctctcctctgaaatgaaaaacttgccaatacggcgctgatcttcggtcatcctgtcttttgattcttactttcatctcacagcgcctcccttttctcctgactcctgttcaaaataaatcctgattttttcgtctttaaactctgcaacggaacatttcatgaattctgatttttcacctggaaaatcttttcggaaatgagctcctcttgattcacgtctttccacagcactcataagtgtcgcttttccaagaacagccatcggatataatctgtaattttcataaacagataccattggatcaatcggaaatgtcctcagctcattcaagctggaatccaatgcgtaaatactatcctgaagaacttctccatcacggatcaaatccatgccataactcatgatcttcattaatttacgcagtgttgctgtcgctgaatacttgccccgatactctgacatctgttccatacgctcaattttctcctgctcatgctcaatataaggaacaaacaattcttcacacatcggctgaccctgtccctcatgcaccgcatgcgctgctgttcttcccgaatgaactgctgtcatcaatgaatttccaccaaggcaatttgcaccatgatattttgacgcagcttctcccacagcatacaatcctgcaatattcgtctgatgcattccgtccactttaataccacccataaagaaatggattgccggcgttacagggatcgattcttttgcattctccagataaacctgtccgggacacattgcaatttctcttgcgacaagatctcttgacatcagattgccttccgtaccatacttttcttccatgaaataaacactgtgacttctattcttataataaagtctccaaccttcacttctgacagattccgagattataaccctcttatttcctctctgaaccgtggtcggataatactggataaattcgagatttctcagctgcactccctgtaaaaaaagctttcctgtcacataaccatcatttaattcagatccagtggtttttccatatagcttgttcattccaccggtagcacagattactgcatccgcataaaccggaatcaacattttagattctggattataaaataacgctccataacacttttcatcccgaataagagcggaataaaaatacaatccgattttcttttctattttacctttaatctcatactccaggcatttctgtgtcattgccgtaacaatctgttttccaatggaattacctgaataaacagtcctttttctactctgtcctccggaagctttcactttccatgtatcatcttcatttcgatcaaaaagaactcccatctcatccagccatttcagatgttccggtgctttctcacagagatttctcacatcctcttctttttcaagaaaacacccactctccagcgtatcattcgcatgccacactacagaatcctcctctgcggtatcaactactgcattgattccttctgctgccataactgactgtgtacgttctgactgaaccggtgatacaagaattacctcatcatcaagttctgctgcttctattgcagcagacatcccggcaattccatttcctataatcaataccttcatttgtcatcttctctttcctaaaaatctcacctattcctacaatcttatccgcgcagccaccgtaagaaccattaataatccacagatgatccatgttacataatccacaagcttctccatcctatcgttcttcaacaaaccaagcgtcagcatagaacggctgaacgatacactcagatgcagaaatgccgcacctgcaaagagaatctccgtcactaatacaagaaactttgctccaccagaaaatgatgctccacttattataagatgaagtactctcatgtgtggatacaataaaatcagtataacaattccactgattctctgcgtaattaatctccaattctctttcctgtatctgtgaaaattaagtactccacgtcttggataataacttacaatacaaaaaactacatgaatcaaaactgtcgccacaatccctcctgcaagtatctgacaatcagaataatcctgtccacctgtcaacacaggaatggacatggtaagcatatgtccaagtaagaataacgtaagcatccaggaacatactgcgttccatttctttatcattaatcagcacccccttctgtatcttattctctctacttttaatcttccacataaacagcgcgggtacgctctccatcttcgatcaattctacctttggaaaactttgtatatactgcttaaattgtgagtatccataatcccgtactttaaaatcaccaaactgaatacgaattcgattccccagtgttccaagagagatcccctgatcccctgtcatctggatctgtcggataatatactcttcaagcatatctttcttactcttatcttcatacagagtaaccgaaactttcgttccttcctggatcagctttaatttcggtaaagtttcaaggaacttggataacaaactgtaaccataacgtcgaacatcaaagtccggatatactttaaccagccggcttccaacttcaccaagcccggtttccctgtcgttattctggttttccgtaatgatcttaaccacgatttcttctattttttcctttgataccttttcaatcttttcttttgaacctcttccattcgacgatgataatgaagcaccggaaattttcttctgtccccttccaaacacatgcggatgataaaactttccttcactctcttccttctctatcgtgttgtcttccagaagcacctctaatacggtgaagatatcacaggctttacggaacggaagcggtgtcttgtcctcgcccattccgattaccatctttccactttcacgaagccggcttgcaagctttgtaaaatcactgtcactcgataccagacagaacccctccaattcacttgtatagagcatgtccattgcatcaatgatcatggcagaatctgtagaattctttccctgtgtataactgaactgctgaatcggcgtaatagaattttgaagaagttcttccttccaactcgcactgtttgactttgtccagtctccgtaaattcgtttgtaagtcacgtttccatatttagataattcatccaggattggcttaatatattttgcagatacattatccgcatcgattaagagtgcgaaacggtcttccatgtctgatactcctctcctgcaagattcttccatgtaaatacaccgttttcataaatcatataactgtgctcggatccttccttcggaatcgagacagaacctggatttaagtactgatattttccaccgttcatatcaaggatttcctcacatgccggaatatgcgtatgtccgttcaacaaaatatctccgtctttcagcatcggaagcttatgtggattatacacatgtccgtgtgttgcaaatattgtaacatcactgttcttttcttccggatctcctgacagattcagataacaataatctgccagaattgggaactccaataccatctgatccacttctgtatcacaatttcctctcacacagagaagttctttcttcattggattaagcattgcgatcacttccttcggtgcatatccttccggcagatcatttctcggtccatgataaagaatatctcctaacaataataatttgtctgcgccttctcttttataagcctcaatcatctgttcacaataaaatgctgagccatggatgtcagatgcaatcattaatttcatttttcacgtcctcctgtctttctaaatagtttctctataataaatgaaaaaagcagtgactcttttcttgagacaccgcctcttattattttgtgcctgtggatattataacacagaatgaatcacagagaaaaatattttcctacaatttcaaaaggcgccggacccacactcagcacagctttatggaattctttctgggattgatttccagattttatccattcctttttcaactccagaaattttatatatccgatataatatttcaaataatttcccggcgatcccagaatcagattatagattttatcaaccgtttcagcatctttaatcccatattttgcataaaattctactgtatccattctgctccatccttcgtaatggattcccatatctgccaatgcataaagtgcaagaatcactgaactattcttctgaagaattgctgcctgagtcttagataacggcatcagataatagctgcacatttccgcataagttgcccagccttctacatatccgccaaaatttaaaatactcctgatgggatcaggattcgtgctttcaaaaaatattgtctggtacagatgtcccggatacccctcatgtgccaacgttgtaaacagtgccaaatcatctcgcatctgtgtttggtttacataaattacattttcttctgtatagtcaattgccggtatcatataaaatgcgggacttaaatgttcctgcatttcctccggtacatattttatccgcagagaagtttttggaatctcaggaaatgcagtccctatccctttttttaacttttctaaaattctttctgctttcccatcttccaatattgttgctgcctgcttcgcttcgttgactgcttcttccataccggtaatatcttctgaaatttgtctgcgcgttagttgctcaagctcttgaatcgtgtctgtcactcctacactctgctgtatataccattcgtagtattttctcccttccggaaaataacacaatcccttttcattcgttcccttccctttcaattccttaaccgcctgtatcaaatcctcatacgccggataaacctgctcttccatctgcctggcgttctgctgaatataatcactcttttctttttcagacagttcctgtaattcaccaattctggacacaaatgtcgagtacagataatttccatttcccattgcaagaaatgcattacattgttctaacacctgatccgccatttcatctgacaaaaacaatcctttgtctgctttttctctttcaaatgcaatgatctgttgaaaataatcccttgtctcacttaaaacatccagatactcttccacatctgtcctgtcataaaactgatattcagataatacaattggaatctgcgtctgtactccattgactgtatttaacggttcttcataatacagataatccgcttcttctctcaaacttctcagatattgctttaacagatcgtatgtaattttattctttacattcagtttttcataagaaaatgtatacaatgcctgctgtatattctccgctgctgtcttaatctgagtactgtctgtctgtatcgttccatatgctgtatccgctttatcaatcccatacgcttctggctcttttaatgtatagtgcagactgatctggcttgcagccacctctttgcaaaacaatttttctgtaaacaatgtaaatctttcattctccacctctttactgctctttttttcttctaaaaatgttgcttcacaaccgtttaaaaagaaaatagaactgaaaagaatactgatactacatacaatacttacacactgcttcttccgccttttccaaaattgaatcaacatagcagactccgacagttatttctctaattttatgcattggcttccttatttatacatcgctgaaatttgtttccaaacagtaatgcatcccctctttatttgtgataaaatacaactatataagatacaggaggcgttgtgtatggccagcttaatatttgaacatttgaaaaaagtatatccgaacggattcgtatctgtagacgatgtcagcctctcgatcgaggacggtgaatttgttgtattccacggaccaagcggatgcggaaaatctacaattttacggatgattggcggcctggaagatattacttccggaaagatctatcttgataatacctttttaaatgacattcttccacgcgatcggaagcttgccatggcatttcagaattacgctctctacaagtacatgaatgtatatgataatatggcacttggactgaagcttcgtgatcttccgcgtacagttatcaatacccgcgtaaagactgctgccgcttttcttggaatttcagacattcttacgaaaaagatccgttctatttccgattctgaacgtcagcgtgtcgcacttggacgtgctattgtctgccacccaaaagttctgcttgtagatgaagattttgctcatcagaatgatgatcttcggaaagatatgatccatgatattctcaagattaacaaagagcttggaatcacggttctttatgtcacaaataactacgaagaagccgtttccctgaattctcgtatcatctttatgaaagacggaaaagtaattgaggacagcatttaagctgtcctctcattttttacccagacaactctcaaaacatgcttcttatgatttttgcttctccaggtaattataaatttctcgcttctgaacgccgcggtctttcgcgacctttttcattgcttctttgcgatcgagcccctgagaaatataatgctccatatgatcttcgatgctcatatcttcccagcacgctttttcttcctgacggatttcttcccggcttctccctgcaattacaatcacgcactctcccttcggatcattcgcctcataataagctactgctccttcaagtgttgattgaaatgctgtctcatgccttttggtcagttctctgcaaaccgttacttttcgatctcccagacgctctgcaagaagtttcaaagtctttaccagacgatgcggtgcttcatacattacgatcgttcttgtctcagcagccatctcttttaaaacttcttcccgctctttcttatctgtcggaagaaatgcctcaaatgcaaatcttcttgtcggaagtcctgacattgtaagcgctgtaacacatgccgccggtcccggaacagaagttacgcgaatccctgtttcataacacattttcaccagttcttctcccggatcagagatcccaggtgtacctgcatctgtaattaccgcaatatccagtccttcttccagcttctccaccagtttacgacctttatcaaacttgttatattcatgataacttgtcattggcgtctgtatttcgaaatgatttaacagcttaatactgtttcttgtatcttctgctgcgatcagatctacctctttcaatgttctgatcgcacgaaatgtcatatcttccagatttccaatcggtgttgctaccaaatataatgttcctgccatcttcatctcccatgactttgtaactgttcagttacctttgtttttcagaattatttccgttcttctgcagtaaagtcccatccttcgtatacataatgattggtggctctattgtcactctgggttttgccccacgcattccttccaccagaaccattgtcggttctttatctatatacggatgaataaactgaatccgtttcggttcaatcttatattcatgcatcttcgtcaaaatctctgtcagccggaacggtctgtggatcatataaaatctgcctttatcctgaagaagccgcatactttctcttaaaatatcatctagtgtacacaacacctcatgccgtgcaattgccttactgtcatctggattccgaagtccatgatccgctaacatataaggcggattcgttgtgatcacatcaaaaaaggccggcttaaatcgttctgccgcctctttaatatctccggttacaatgctaattctgtcttccagatggttatgtgcaacactgcgtcttgccatttctgcagtctcagcctgtatctcaagccctgtaaaatgctttcctttcgtctttcctgcaagtagaaccgggataattccattcccggttcccatatcaagcacgttctctcccggctttacttttgcaaaatcagagagaaatactgcatccactccaaaacagaattttgaaggattctggatcaattccaatcctccaagctgcagatcatccagacgttcgcctggtctcagattatttgtcatctaacttcgaagctccctctttcttctccatccgctcaagtgcagcaagtttcttctgctcttctttcgatactttctgtttctttcttctcggacggaatttcagatcatccgctttatactcgcgaatctctttctcgtcattctccagattaacaataactttcacaagtctgcgaagtacactcaaagaatgtactgttccggtcaatccatcacttgttgtcacattatctccaacagaaggtaactgactgttaagcacttcataagtctcttcctcattcgtcaggcaacacatcaatcttccgcagacccctgaaatctttgtcggattcagagacaggttctgttcctttgccatcttgattgataccgctgcaaactctgtcagatacgtactgcagcataatggacgtccacagataccaattcctccgcggatcttcgtctcatctctgaccccaatctgacgaagctcaattcttgttctgaacacagctgccagatcctttacaagttcacgaaaatcaatacgtccgtccgctgtaaaataaaacaggactttattattatcaaaagtatattctgcttcaatcagtttcatatccagtccatgcttgcggatcttctcctgacaaatcttaaaagcctctttctctttctgacgattcttctctaccgtcttctcgtcctgctctgttgcaatacgaatcacagacttcaaaggctgaatcactgaatcatcgtccacctcttttggtgcactgacaacacgtccgtactcgattccccgtgctgtctccacgattacgtgatctccctgtttgatttcaaactctcccggggaaaagaaataaatctttcccgctgttcggaatcttactcctattacttttgtcatgtatctagttctcctttattgtaagcaagagcagttccattgtcagttcaaaattaacatttgctttcagtctggctttcgccttttcaattgcgtccaaaatattctcaattccttcataagagctcttacttgcacgcgccttgatatatctcagctgatcagaaaatactactctgtctacattcttagttgccttataaattaatacatctctgtaccagattgcaatcatatccagatagtcgttaatctccatcttatatgtcatacattttttcactgcatccatcagttctgaaacattcatctcatcaatatttctaagtaaatgtacaacttcttccttaatctcattgaaatattcggatgtcgcaagcataatcgcttttcccatatttccctgggcaaatgctacacaaacatctgctttataatcaggaatctccatctgctccatcagatatttctttacgagctgatctttaatattacgaagtttcatcataacgcatctggaacgaatcgttggcagtaaagcctctgcattctctgtcagaagcataatcaccgcatattccggtggctcctcaattgtcttaagcaatgcattctgtgcctgggcactcattaagtctgcctctggaataatataaatcttatacttactgctgtacggcttgatcacgatatcattattaacctgtgtacgaatatcatcaacactgatcgtattcggtttctcatgtgtcaccttaataatatccggctgattgccgctctgtgcctgtttacaagactgacattttccacatgcctctccgtcttccgcacgattctggcactgcaggctcatagcaaaaagattcgcaagaagccgctttccagatcctctttcgccattcagaatatatgcatgcgatactgcatcagcctgaactgcgctcgaaatatacttgattatgtttttgtgccctactacatctttaaaactactcatttctatcacctgccgtgtatcttatttcatctttagcggataatattctcacaattatccacctaacaatagtatattcataattttaacatcattttcttacaaaactatgaactaccatttaagtatatcataaattcacgtttatttctcgcaaaatttcttccatacaagtttccttatcaatattttgaaatctccgcttgattcccgccctttccagattctcctccgagaaatcttctgcatctgcaagaaatcttctgcacagttctgcatactgcggtttcgtctgtgcccgttctctttctaacgccctcgacagtcttaatccatcttctacttctatatataatggaaccataacatcatcaccaaaatattctttcaatgcataatatgactcaattgttccgatcacaagataatcatactgccacaattcaatctgtccatcatctgctgtaaaataagtccagattccacactttgtattgtaagaacgaaactcgatgattttctcctcgtccatcatctcatcaaatcgttcctgatcgacaaagaaatattccactccgtccttctcaccctcacgcattggacgtgttgtatatggaacgattgaatgaaatttaggcatcttttcgatcaattctttgtaaatcgtatccttcccggaagcactttttcccataatataaaatattttacccatactttttctcctgctcttaaacatgcatctggattcgtattctcgacttccagcctgtcggttctttattctggattccccgcaactaataaacaattctcctggcttagcccttcaatggaaaaacccatctctttatattttaccatcttttgcacaatagtagaagtaattctctctccaggaacaatcattgggattcccggtggataaagatagacatattccaatgagattcttcctgatgcctcattccatttcacactctcaccttccattctccctgcttcaaaggaagaatatgcttgttctaatggaatcatttcataagaaatattttttatagtatgatcctcatcattccctgaaagctcttcgcacagaatatttttatcaatctccatcactgcctgaaccaatctgtccattccttcttgtgtatctcccggtcctgtcatagcaatcacataagacccggaagccatctccatctccaaatgataagatctcagcatttcctgaaatcgttttccattcaaaacttccccatctgtattcttaagattttttacagataatactatctttgaccggtcataatgttctgcctcaattaattttatattctttaactgcttcagtctctctcttgcttgctgcaaacactcaacataagtgtccatgatttcttctctgcactcatccattccccggacacactcatcaatggatgccattaaaatataagaaggactgctggattgaagcatatgcaaataatttcttatcccttcacgatcagcatatctcccatttatatgaagcaatgctgtctgagttaaagacggaagtgtcttgtgaagactgtggatcaccacatcagccccccgtgtattcgcattttgcggaaaatatgaatgaaatccaaaatgtgcaccatgcgcttcgtcaacaatcaggggaatcttatattcatgcacgatttccgcaattgcttcaatatccgacacgactccttcataagtcggtgaaacaataacaaccgcctgaacatctttatgttcttcaagtaacttctttacctggtctacatggatctcaccattaagatctgtctcttccgaaaactccggataaatatatactgggcgtaattcatttatatataccgcattatataccgatttatgacaatttcttgccatcaagattctaccaccacgttctgtacaccccatcaccgcactcaaaagaccgactgtactcccattaaccagataatgcgtctcttccgcttgaaatattctagctgcattttcctgtaattctttcaacagttcttctgcatgatgaagatcatcaaatccatctatctctgttatatcaatattatatggtaacctggctctcatgagctccatattacgcttatgtccaggcatatgaaatgcataataatctgaatttccatatgcagttaatttttcatataaatattccataataacctcttatttgtaaaaagaacctatctgaataatgatagattctcttgatgccatattttatttatataaagttaaaagcagtaatcataatagattactgctttctttcagtgagcgtgcggggattcgaaccccggacaacttgattaaaagtcaagtgctctaccacctgagctacacgcccttaaacactcgcagaagttataatatcataagtcttatataaatgcaagcacttttttcagattttaaatttaatttaaatttaatatttaaatgcatctcgccacatcgcttcaggcgattctaaatggcgagacacaatcttattttctcaaatcatagaactttccgctcaaatttttcacctttacataagaaacatgatctataaacattctcgaagtaaataccgttttcccgtgatcacagaaaatctcaatactggaatgatctaccataacccggacaatctgtttcttctctaactgttttgcataacggattgttccaaacttctccgcatacacttcggtcataccacttctgtccagacaatattcttccccatctgcgctgaaagtcaaacagttaccatctttatttcctatttctatagaaaacgcactttctgtatttccttcaagctcaaaggaacattcttcaacctttatatgctctgtaatgcttctttcatttgcacgaagttgctttagctcttctaccggctgttgaaccaacctttcttcctcgatccgaatttctctcgggagtgttaacatgtgagcccaattattcttatcagttggatattcgctcttagaatttccaagccatccaaataagattcttcgatgtttttcatcctcatacgattgaggcgcatagaaatcaaatcccttatcaagttcatacatttctgaaaaatgaaattcttttcgttctgtatccaatggttttcctatcatgtaaactacggagaacacatttttataatcatatttattctcacttgaaattcccatcggagaacaaaacagcactcctttttgattctcttcataataatttggacattccaacatgtaacctaacattgcttcctgtccattctgaagtaatctcactcttccggcgtactcatatgaatctgcctgcttacctctgtacaacatcagaattccttcatgttctttactttctgctcctgtcagcatccagtattcactgtcccttttccagacatatggatcacggtaattcattgtcgtctgatccggatccatttctacaatctttttccggtctgtcagtttctcaccatcaaatctggcataacaggtacatgggatcatctcttcattttcaattcctgtatagaaaacatgtactttttctccctcttttaatgccattcctgtataacacccgtaagagtctgattctgtatccgggtacattgccacaccatgatcttcataatgaataaaatcttttgttgtcaaatgataccagtgtttcaacccatgtaccggtccagccggaaaccattggtaaaaaatatggtgtatcccattaatctcacacagcccattcggatcattcatcagaccgcatttcggtgcaatgtgccataccggataatacggatctttcctggttgtctcctgtatccgttgaaaatattcagccggcatatccgtaatccgaatatgccggttctgatgatttgaaaaatcatactgaaacataaatttactcctttatactgcttctggattcttcttcataatcagccatgtgcctgcaaatgcaactcctacagaaagcagtaatacaataatatactcaatcattcctccctgaaggtaaagcagcataccagggatcatagacgctccggttccctttgcacacaaaccaacgattgctgcgaatccaccacctacagcacctccaagacatcccatgaagaatggcttaagtcttgggaatgtaagaccatacataacaggttcggaaattccgaataatgccgggatcagagctggaatcatattagctctcttctgcttattcttctgcatcatgacaattgcaagtcctgctccaagctgtcctgcgattgctgcagatcccattgggttaatataatctacaccagtctctgtaaaaatacttacaataatcggtgttactgtatgatgcatacctacagaacagagaatctgaatcagtcctccataagcgattcctccaattccaaatggaagtttcagcatcataaggatcagatctgtcattcctttttcaattcctgaaagaaccggtcctacaacaaagagtcctgccaaaagtgaaacaagtaaagtaaggaatggtacaagcagcatgtctaagatatccggaatcacctgatgtaacttcttctccagttttgctgcaaagaatcccatgaataatgcaggaattacagaactctgataacctgtaatatttaaatgcaacggtccaaagacaaaacttaacggatcagcaactccatttaccacatcccatttatttggaagagttggtgatacaagcatcagcccaagtacaataccgaggatcggtgagccaccgaacttcttgcatgcagaccatgcaactaatactgggataaatgtgtatgctgtgtctgttaatacagaaaatactgtatcaaaagatggtgataactcaattccaaatccatttacaagaagacttcttactcccatcagaatacctgttgcaagaagtaccggaatgataggaataaaaatatcagaaatcatctttgttgtactctggaaagataatttttccttctccccattttctgttacttcagcatctccagctgtcactcctgccagtttctgaaactcagcacaaactttattcacaaatccagttccaagaatcacctgatgctggccactctttgagaaataacctgctactccctgaatctctttcatcccctcttcatcaataacagatgcatcctttacttccacgcgaagcctggttgcacaatgtgtcgcactgattacattttcttttccgccaaatgctttcagaatttcctgcgctgtctttacaggatcttttttcatctctcattacctcctatttgtgctattataacatatatcgtttttatcaaatcgattcgatatgtttgttttttatagtggccttggaatatttcctatcggccactgttatttttgtttatcgaatcgtttcgatatctgttgattataatagatcattaccatttcgctgtcaatgaatttaatcaattctttttgttttctgtatttttcaacaaattaaagtcgtgatatttggtaaaaagtaacatgtaatttaacatgtttcaccactttggactgtcacgccaaaaatagattcaacctcttcaatttttttcccttcaatttgcgagatgatcatggacactaatttttgagccatttcttcaattggctgaacaatcgcagtcagaatttctggtccgatttttgtaatatacgttccatcaatcgcaactatgctgagatcctttggaacttttcttcctcgtaactgcgcttctctcagacaggcagccgcagccatatcaacaccaagaattccatccatatcattacatgtctcaaatgcacgaactgcagcatcctgatacttttcagtagtaaatgtattatatccaacagaaatatctacaacttcacaacctttcttctgaagtatttcgcggaataccttctccttttcatcctcatagttcttaatcgtatgagaacttacaagctgtacaactttctttctgcttttctccagaaaaagcgatgctgctttctccgccacctgtttcttatctacatgaacagtcggaatataatccgccaaatagcagtcaattgttacgattggcctgtcaatcttaagatatctctccttcttcaatgaatgagctcccataatcacgccatccatagttctacgatccagcatctgaaggtaagcttcttctacatcttcacgcccagctgttccacaaaccagtgccttataccctctggaatacagttctttctctgcgtatttaataaacgtactgaaaaagggatgtgcgatatctggaacaataattcctacaattcctgatttttgcatcttcagattacggccaagctcgcttggaatataatttaattccttcattgctttttcaatttttttcctggtttcgtcagatacatatcctttattattacacacaagtgaaacagtgcttcttgatactccagctaattttgctacatctccaatgcttgccaaatcaatctctccctatcatcaaatcataaatctacagttactcttctgcattagagttctttctctaataataaaatatagaaaaaagactgcggtatacgcagtctttccgtttacataaaataaaaatgcccagaaccggaatcgaaccagtgacacgaggattttcagtcctctgctctaccaactgagctatctgggcatagactataaaagtctgagttgcgggagcaggatttgaacctgcgaccttcgggttatgagcccgacgagcttccagactgctccatcccgcgatattaaattaatttctcaaaagagaaaagccgatgatcggactcgaaccgataacctgctgattacaaatcagctgctctgccaattgagccacatcggcttataacctttcggttaatggatggaggtggattcgaaccaccgaagcaatttgcagcagatttacagtctgtcccctttggccactcgggaatccatccatgttaagtgggacctacagggctcgaacctgtgaccctctgcttgtaaggcagatgctctcccagctgagctaagatcccacataacgacccagaagagactcgaactctcgacctccgccgtgacagggcggcgctctaaccaactgagccactgggccattcttcaattttcagaaggctatgtaccttcaaaactacatacagttaaaaccaacatcatcatccaaacctatcactgctttggttatgccctcgacctattagtaacagtcagctccatgtgttaccacacttccacctctgccctatctacctcgtcgtcttcaaggggtcttactaacttgacgttatgagatatctcatcttgaggggggcttcacgcttagatgccttcagcgtttatcccttcccggcttggctactctgctatgcctttggtaagacaacagatacaccagcggccagtccatcccggtcctctcgtactaaggacagctcctctcaaatatcttacgcccacgccggatagggaccgaactgtctcacgacgttctgaacccagctcgcgtaccgctttaatgggcgaacagcccaacccttgggacctacttcagccccaggatgcgatgagccgacatcgaggtgccaaaccactccgtcgatgtgaactcttgggagtgataagcctgttatccccagggtagcttttatccgttgagcgatggcaatcccactttataccaccggatcactaagtcctactttcgtacctgctccacccgtcggtgtcgcagtcaagctcccttctgcctttgcactcttcgaatggtttccaaccattctgagggaacctttgagcgcctccgataccctttcggaggcgaccgccccagtcaaactccccacctgacattgtcccccagccggatcacggctgctggttagaaacccagtactgcaagggtggtatcccaacattggctccatggcaactggcgttaccatttcctagcctcccacctatcctgtacatgcaataccgaatcccagtatcaagctggagtaaagctccatggggtctttccgtcctggcgcaggtaaccagcatcttcactggtatttcaatttcaccgggtgcattgttgagacagtgcccaaatcattacgcctttcgtgcgggtcggaacttacccgacaaggaatttcgctaccttaggaccgttatagttacggccgccgtttactggggcttaagttcaaagcttcgcttgcgctaacctctccccttaaccttccagcaccgggcaggcgtcagcccatatacctcacctttcggttttgcatagacctgtgtttttgctaaacagttgcttgggccaattctctgcggccatcttactggcactccttctcccgaagttacggagtcattttgccgagttccttaacaatgcttctcccgtcggccttaggattctctcctcatccacctgtgtcggtttacggtacgggtatcctgcaaacaatagcggcttttcttgacagtcagctcacgtgcttccctacttattttcagtccacatcacgtcttcagattgaagagcggatttgccaactcttctcctacctcgcttgtaccggtttttccattcccggctcacgctctctgcctgtgtccccacagttctgttacaggatagtacaggaatttcaacctgttatccatcgactacgtctttcgacctcgccttaggccccgacttacccagagcagatcagctttactctggaaaccttagatattcggccggaaggattcccaccttcctctcgctactcattccggcattctctcttcttaaaagtccacagctcctttcggtactgcttcgtccctttaagaatgctcctctaccaattgaattctcaattccaaagcttcggcagtgtgttttagccccggacattttcggcgcaggacctctcgactagtgagctattacgcactctttgaatgaatggctgcttctgagccaacatcctagttgtcttcgaaatcccacatccttttccacttaacacacattttggggccttagctgttggtctgggctctttcccttttgaccacccaacttatctcggatcgtctgactcccatacatcatctacacggcattcggagtttgatatcccttagtaagctttgacgcccccttaggaattcagtgctctacctccgcaagactcgtatgaggctagccctaaagctatttcgaggagaaccagctatctccgggttcgattggaatttctcccctatccacacctcatccccacccttttcaacggatgtgggttcggtcctccattgccttttacggcaacttcaacctggacatggatagatcacccggtttcgggtctactccgactgactatgcgccctattcagacttggtttcccttcggctccggacctttagtccttaacctcgccagccagcgtaactcgccggaccgttctacaaaaagtacgcggttgagcatataaagctcttccacagcttgtaaacatatggtttcaggttctttttcactcccctcccggggtccttttcacctttccttcacagtactatgcgctatcggtcactaagtagtatttagccttacggggtggtccccgcatcttcccacaaggttccacgtgtctcgtggtactctggatcccgccatgtcaactcgtctttcgcttacggggctttcaccctctctggccggctttcccaaaaccgttctgctaaactcgttgaatcaattccgcggtccgaaccccagcatgcacgcacgctggtttgggctcttccgttttcgctcgccgctactcacagaatcacatgttgttttctcttcctccggctacttagatgtttcagttcaccgggttcccttccttaagttatgtattggcttaaggatacttgaggtttgctcaagtaggtttccccattcagagatctccggatcaaaggatatttgctcctccccgaagcttttcgcagcttatcacgtctttcatcggctcttagtgccaaggcatccaccatacgctcttatcagcataaccaactcgacctcatcccacgggaatgggataatgtccacacatacatagcgttgtatgcgttggtgatagtcaatttattttaagtctgttttcttcagactgtaagttaatgttgttaacattacctcggatgtcttgattagatatttatctaaatctattgatttttactatatgcagttttcaaggtacataactggtttctttcgaaaccaagtggagaatacgagagtcgaactcgtgacctcctgcttgcaaggcaggcgctctcccaactgagctaatcccccatgggtatgggcttaagtggactcgaaccaccgacctcacgcttatcaggcgtgcgctctaaccagctgagctataagcccatattcttttgtaatttggcggccacctactctcccacaccgtctccagtgcagtaccatcggccgcttaggtctttaccatcgtgttcgggatgggaacgggtgttacccctaagcgcatcgccaccaaaaggtttaggttacttgataacccaacaatagacaacagtaaaaactctctacttttttcttccttagaaaggaggtgatccagccgcaccttccgatacggctaccttgttacgacttcaccccagttatcggtcccaccttcggcagctccctccttacggttgggtcactgacttcgggcgttactgactcccatggtgtgacgggcggtgtgtacaagacccgggaacgtattcaccgcgacattctgattcgcgattactagcgattccagcttcatgtagtcgagttgcagactacaatccgaactgagacgttatttttgggatttgctcgacctcgcggttctgcttgctcctttgtttacgccattgtagcacgtgtgtagccctgctcataaggggcatgatgatttgacgtcatccccaccttcctccaggttatccctggcagtctctctagagtgcccggccgaaccgctggctactaaagataggggttgcgctcgttgcgggacttaacccaacatctcacgacacgagctgacgacaaccatgcaccacctgtcatccctgtcccgaaggaaaggcaacattacttgccggtcagggagatgtcaagagcaggtaaggttcttcgcgttgcttcgaattaaaccacatgctccaccgcttgtgcgggtccccgtcaattcctttgagtttcattcttgcgaacgtactccccaggtggactacttattgcgtttgctgcggcaccgaacagctttgctgcccaacacctagtagtcatcgtttacggcgtggactaccagggtatctaatcctgtttgctccccacgctttcgagcctcaacgtcagttaccgtccagtaagccgccttcgccactggtgttcctcctaatatctacgcatttcaccgctacactaggaattccgcttacctctccggtactctagattgacagtttccaatgcagtcccggggttgagccccgggttttcacatcagacttgccactccgtctacgctccctttacacccagtaaatccggataacgcttgcaccatacgtattaccgcggctgctggcacgtatttagccggtgcttcttagtcaggtaccgtcattttcttccctgctgatagagctttacataccgaaatacttcatcgctcacgcggcgtcgctgcatcagggtttcccccattgtgcaatattccccactgctgcctcccgtaggagtttgggccgtgtctcagtcccaatgtggccggtcaccctctcaggtcggctactgatcgtcggcttggtaggccgttaccccaccaactacctaatcagacgcgggtccatctcataccaccggagtttttacccctgcaccatgcggtgccgtggtcttatgcggtattagcagtcatttctaactgttatccccctgtatgaggcaggttacccacgcgttactcacccgtccgccactcagtcaccaaatttttcattccgaagaaatcagaataaggtgcttcgttcgacttgcatgtgttaagcacgccgccagcgttcatcctgagccaggatcaaactctcgttaaaagtgtttgtatccagttcagaatcaaccaactagctaattcttccctttttactgttgttttggtttgttaaaaaccgttcttaaaaatcttctcttaaagaaattttcaagggttgttgttgtctattgttcagttatcaaggttcttacttcgctttgttcatttgcgacagctcatttattttatcataagcacttcgctttgtcaagaacttttttgaagttttttatttttcttacctcttcgctttgtttcagcgaatcagctcatttatattatcatgtattttttagaaagtcaagaacttttttgaagtttttttattttctttttacatgatttttaactttcttcaaaatcaggagaagtcgccagacttctgtcgtcccgctcttttgatttaagttaaacggagaaagagggatttgaaccctcgcgccggtcgcccgacctacacccttagcaggggcgcctcttcagcctcttgagtatttctccgtacactgaattctactatagaatctatagctttgttcaattgtgtgcaccaacagtgcgaaatttattatagcaatacaccgtcatcttgtcaatcactttttttcatttttttaacaaatttttaaaccatctgttctacgcagcttttcagctttgcagttgctgtctcaatatccttttgggcaaagattgcactgatcactgcaacaccattaattccactacccgaaagctcttttacattatcttgtgtaattcctcctatagcaacaaccggaatatcaactttagtacagatttccttcaacacactgtgttctacttcccgtgcgtctgtttttgttcctgtttgaaacaccgctccaactcccagataatctgccccatgcttttcagctaataaggcctgctctactgtccgtgcagagacgcctatgattttatcttctcccagctgcgctcttacatcaagagcttccatatcactttgcccaacatgcactccatccgcatcaatttccttcgcaagcttcacattatcattaattatgaatggaactctatattttttacataactgttgtatcttttttgcctcttctaaaaactcttcttctgtcaaatctttttcacgtaactgaataaaggtagcgccacctttcagcgcttcctcaacctgttcataaagcgtctgcccattcagccaatgtctgtccgtaaccgcatacagcaacatctgttcccttaattgttccttagtaaagctcatacttagcccctttctccagtttttctcctgtcatattatagatggcatcaataattctatttctatatgtagcgttaccatcgccttcctgcattctcatccatgctatttcaccggcaacgcccatcatacaaactgctgccacagcagcttccagttttcttttcggatttgctgccagaaaagcggtcgtaataccggataactgacatcccgtgccagttattcttcccatttctgaacgtccatttctaattacataacatttctcgccatctgtcacaagatctattgctcctgtaattataacaattgcttctttctttttcgcaaaacctttaataaatgatatgctctgttgcaaatttctttcattaacggcttctgtaagatcagcatctacgccttttgtacttccgcttccataagccagcgtcttaatttctgaaacattacctcgaatcacagaaaactttatctcttttattaattttaatgccgtctccgtcctgaacctgcttgctcctgctcccaccggatccaataataccggatgtcccagttcattagagcgatgcccggctttaagcattccctcaatactcgttttatgtaatgttcccaaattaatgttcagccctccacatatagatgtaatgtccgctacatcttccggctcatctgacataattggactgccaccacatgcaagaatcacattcgcaacatcattcactgttacataatttgttatgttatgcaccactggggctttttttctaacttgatccaagcattcctttagcatttctcttctaccttttctttcgtcaggttcttattgattgtttcctggatctgctgttctactgcagcagcaatttccacggtcttcatatctttataatcttcataaagcatcggtttcagaaaatgcacctgcaccgtcaccggtcgggtactgtttgtatcaaacggtttaaaagaatcaacaagtgccaccggaataatcgggcactttgctttggttgctgctttaaagcttccccctttaaaagaaccgacattattcccattttttgaacgcgttccttctgggaaaataagataatttctccccgatacgacttcttttgttacacttgtaatggttttcattgcctgacggacatcctcacgatcaatcataaatgctttcatgattttaaatacctgttttaaaaacggaacgttttccacttcttttttagctacaacagaaaaagggtgcgtacacgcttcaacaattgccaatacatcatacaaaccttgatgatttggaaaaaacataaatccatcctgctttggaatattctcctgtccatgtacatcgattgttacatttccgcctttatttgcacgaaaaacaatccaacgcaaaaattcataattatcttcttctgtatatttatccacatgtgaagcccgatagcagagtttaatccatccccccggcacgatcaacagattccgcaataccatcagtagaattcttctcatgcattctcctccattctgcaataatccttaattgctgtttcataaagattattcccatctttatctattactacaataaccggaaaattttcaactgtcagttttctgatcgcttctgttccaagatcgtcatacgctaccacttctgaagatgtgatacattttgaaagaagcgcccctgctccaccaacagccgcaaaatatactgaaccattgcgtacaattgcatcaattaccgcttgatttctttttccttttcctatcatagcaccaagcccaagatccaggagctgaggtgcgtatttatccattctgcttgctgtcgtcggtcctgccgagccaattgggcgtccttctcttgccggtgatggtcccatgtaataaatcacctgaccttgaatatcaattggaagttccccgccttcctgtaaaatctcatacattcttttatgcgctgcatctcttgctgtatagaccgttcctgtaagataaacataatctcctgccttcagtgttgctacggtctctttcttcattggtactgttatatgcttgtccatttcactttcctctttcacttagcctgttgaattaaattgtacgaatcacatgacgatttacatgacagcaaatattaaccgccaccggaagtcccgcgatatgtgttggataagtattaatattcaccgcaagtgctgttgttgtccctccaagtccaccaggtccgataccaaggctatttatttttgtaaggagttcttcttccaactcttttacgtattcaatttctgaatgtgatccgacttcacgtgtcagagcttctttggccatcaaagcgcatttttcaaatgtaccaccaattccaacaccaaccaccattggcgggcacgcattcggtccggcatcttttaccgcagtaagaaccgcatcttttacaccttcaattccttctgccggtttcagcataaatacacgactcatattctcgcttccgaaacctttcggtgctacttttatctttacctggtctccatctacaattcttgtatgcaaaactgccggagtgttatcctttgtattctcacggatcaacggatctccaacgactgatttacgaagataaccttctacataaccttgacgtacgccttcatttaccgcatcttccaatgctcctccttcaagatgaacatcctggccaatctcaagaaacactaccgccattcctgtatcctggcaaatcggaatcatatcctctcctgcaatcttcaaattctcttgcaactgttccaatatctgttttccaagtggtgcttcctcattcttttcggcacatttcattgcctctgccatatctggtgacagaaaatgatttgcttcaatgcacatttctttgatgttttttgttatttcttctacacgtattgtccgaatcatttcttctatctcccttttctttgaaacaggtacgcaagcgcaatgcaagcgtacctgtatttttatatctcaaattcaatttttctgcctgttcgatggtactggtgatatctcactcctgctgcatccatcattcgttttgatgctttcactcccgctgtatccgcgtatttgtcacaatcataaataacttctttaattcctgcctgaataattgcttttgcgcattcattgcacggaaaaagagatacgtaaagttttgctcccgcaagacttccgccattataattcagaattgcattcaattcactatgcgttgtatatacatattttgtctctaacggatcttcgccttcgcgcgcccatgggaattcatcatcagaacatcccatcggaagaccattatatcccatggaaagaatcttattatcctgacttacaatacaacacccaacctgtgtattcgggtcttttgatcgcattccggaaagcattgccacgcccataaaatattcatcccatgataaataatctgttcttttatctgacattattcttctccttttgcatatgaattcagtttgtctgcaagtttatctataagtcctgtcagtatctcaaaacattctccataagctgtcaggggttttccataaggattcggaagttcttctgatactccaacaaattcatttattgtatatacattttttacattttcataatccgaaagaactttgttcttaattgtctcattcaatgtcaatacaagtgtatctccttgtagattgctgccatcaaactgctttgacacatgattttccaacgtcatctgagcactcttcataattgcctctgccttctggtttaccggttcagggaaaagcacaaccagtccgccggattcaataatatactcttgctcaagatcctggtgacatagtaattctgccgccattggtcctactgccgaatccgcctcgctgacaaaaatcactcttcgatacttctgcttctttgtgatctctgttgcctgcaggtgcatatgtcctgccgccttttcaagacgattcataatcgcctttcctattccgttcatagcaaaagattcactataaatcagatcaacgtcttcttcatcgaattcacgaagcactcgataaaggtttcttgcaatagtattctcattctcacgggttcctatattcttcacaatcccataattatagaactgaactgtttcccccgttgcaatgattccgacttcctttccttcccgatgcgcggcataagcaagctgacgaattgcaagaatctcttctcttatatttccttccacaatcatcattttcgccttcggtgcataatgtcggtacttcattcccggagctttcggcgcctgcttgctttcactgttaaccaatgtctcatcaacaccaaccggtccgattacctcctcaaacatatccgctgtaattgcacccggacgtaaaatcatcggcggctctaccgtcatgtcaagaattgtggattccaatccgatatctaccgcacctccatccaggatcatatcaatcttaccttccagatccacccgcacatgctctgctgtcgtcggactcggacgcccggatgtattcgcactcggtgctgaaacaaatccacctgccgcccggatcaatgccgctgcaattggatcacttggcatacgaaccgcaaccgtatctaatcctccggttgtcccgtaaggtacactctcacttttttcaaatatcatcgtcagcggacctggccaaaaatgtgctgccagtgcgtctgtctccggtggaatattcaccgccacttttttcaaatcctcatagtctgcaatatgaacaatcaacggattatctgatggacgtccttttgctgcatatgttttctttgccgcctcctcttttaatgcgtccgccccaagtccgtaaaccgtctccgtaggaaatgcaacaagacctccttgttttaatacatttcccgcttcttctattacatcctggtttatttggtttttatctatttttctaataatcgtttccataaattttattatatcattatttgttctaaaaaaaaactgtttctcttctactattcattttcttttatataagacaaaattccttctgccactgcttctgctactgatttctgataatcttccgtaaccagcttctgtgcttctttatagttactcaaaaaaccacattctacgatcactgtaggtacttccgtcttttttaatatataatatgtattatttgcttttatctttttggtattatccggatttaccttttgtaaagcatcctgtattatccccgcagctttttctccttccgtcgatgtctgatagtagaagacctgcgcaccgaaaacattttcttcatgataactgttctgatgtatactgactgctaatacaggagaaacttcattcataatctttactctgtatttcaaatcttctactttactttgtgcaagctgttcatctgtttctctggtcatgattacctgtatattttctttttccaaaattttctttacagaattcgtaatcgttaaattgatatctttttctttcactccattgattccgaccttccccgaatcagtaccaccatgtcctgcatctaaaacaactatcctgtctgacttttctgcttctccgattgtctccatttcttcttttaattctttctgtaagtttttcgaaactttccaacaacctgcgataagccctgtcataatcagaatccctatcatcaacctgatttttctttgcaaaaaaacgacctcccttcacatattctatctatatgcaatgagaagccgttttttaacttatcttttatttaatttacatactgagaaatgagcttccatacactgctttcttcttttcccagactccattctgccacacctgccagtttattttcctgtatcgccttcagctttgcttccaatgattgagcatcttcaagccagatacggtaggttccgccatccgcagaccattttgcatagttttgctgtgtcttttcatcccactgtgctgttgctcccgcattcacaacactctgcgctgcttcttccattcccagtgccttacttgatactttattcggataagatgctgcttctgtaccagcttcttccgaaagttgctccgggctctttgctgtctcaaaccataatctggtaaaaaatggaattccggcaattactttatcagctgatacctttttcaatgttttttctattccatcctgcaaatagctgatcgatgccactgatcccgcttcataggatccttctgtatgttcatcataagccataatcaccacgtaatctgccacaatcccctgctctttaagatcataatgtgaattgtatgactgtggcacataattatcaactgaaaatacaagattattctggtggcacttcacagacagctctctcacaagctgcacgtaatgcacaccacacttggaagaaatcaattcaaagtctaagttaattccatccactcctgctgccactgccgcagctacaacctgatcttccagttttgctctttttgatgtataacgcaatgtctcataggtctcatcataggaattcgttccaccatgaaaatcccggaatacagcccacacttccagtcctgccgtatgtgcataattcacatagtccgcatctgcaattgaactgatattaccttccgtatccgcaagactaaaccaggttggtgcgatcgtcgtaagtccactggttgatgcaagtacctgctgaaccgcattattcgctgccgcattcgtcacattatgccatgccatattgatcgaatgatcttctgtcatgtctgaataaaccggttccgtaaaatctctggatgttttttcttttttctggttctttaaaaatttggtcttaatatatcctacataaccgtccactgtggcaactttcatccagtcatcttcgtcttcaagcactgtcaccttgtccgattttttaacttctgtcagtatcggactcttaacgccaccaagataacgaacctgtgtgtctttcttcacttctgctgtctcgatctcgccccactttgatgtgataattgctctgtttggttcctgttccacagaatattccatattcgtatactcttgtatgaacggaagtgcgatatatgcgatatctccatccgtcttaagaattacataatcttcactttttgtttcgttcactgctgtatattcactgctgttctcacttacagaaatatttccatccggcaaggtatataaaagcacccgttcgttcgcatcccagtaaaatctgctgtttatcttatcacgaagaacctgatatgctacataatattgtccatcaaaaaccttacccggtataacactatctatagaagaatcggaagaagattccgcggaactatcttcttttttcactacttcattattaatgatcaatgccagatcatcactgttttctattccataatattgttctttatcggcttcctcatttgatgaaccgtatctcttaaagaaaactgcgcctgctgccaaaatcatgatcaataatatgatgatcattacgaaaagaattttgttacgtcttttccgcgctctattcactttcttcgcacgtcgtgttcctgaccttccatttctgcctctacctgttgtcattggtcttccctttctccgggaactccccggatgtccagattgtccttctactcttcccctgcttcgcgcatgggtactgccttttcttttgtccatgccaaccctcctgattgcaatttttatatctctggcgctttcttacacaaacagttccttacgctctgctgtgtgtatttctaatatctccacatctctggataaaataatgattctggaattcattatatcatattttcatcttgcgtcattaacaaattgcatctacaacagttgtacatatcaaaaagttgttacaccttaaatgtctgtccatcttctatcaattataacagcttacaaatatacttctgtccggcagttcaaggggtaatctctgcctgtctgttatgattcacatctgtaaaaaccaatgattctatccttccttccggatcaatcacataatctctcatataagtaccttcttctctggccatatatgctgtcacaatctgcaatggactcatcggatatccatccataactatgtccactcctttttcttcataacctcttagttccgcatataattccttatatccatcttccgttctcatatcgtatgtactccttctctcctgggatcctgataaaacgttgtccgccatcttcgaccataaaaggtatctgtgacatactgtagaacaagtgacggacaagaagacaaccctgatcttcggagggtctccttctcataattattgtgaattttcccttgatttcagggaattgaatttttttgaaaatcagaaatgctttcagtgcctcctttcttaacattctgttttatcaaatggtgtgtcttctgtaagtgccattatatgagcagccttttggaatttcaatgtgtttattgttgataagtgggtgggatttgttgataacctaaaatagttataaacaattttcgttttcctttacatcttttctttttttgtttatactaaacgatgaaaagatatatctagttatgaacataatgaacagttcttaatccacagattatcttaatatcataagacataaggatgtgatcatatgaaaattgaaaaaatcaatgacaatcagattcgttgtactttgacacatgccgatcttgcagcccgcaatctcaagatcagcgaactggcttatggtaccgagaaagcaaaatcactatttcgagatatgatgcagcaggcctctttcgactttggattcgaggcagatgaccttcctctgatgatagaagcaattccttcttcttcagactctatcaccttaatcataacaaaggtggaggatccggaagaacttgatacacgtttttccaagtttacacctgccggagattctgatacactgaacagcaatgttcttgaaaagcttcagggcgcagatgaattctttgatctgcttaacaaagtgaaggaagtggcttccgaagcgaaagatccggaacctaaagaaacagtaccgacatttccggtccgcctgttctctttcgacacgttagattccgtaattgaggcttcccgcctgcttgctccgttctatacaggtgcaaatacattatataaggacgaggagaataataatacctttatccttgcgctggcacctgctgatggcgcagatcaggaatttaataaagtatgtaatatgctttcggagtacagttcccctgagaagggagattcttctgttcttgcatttctggaggagcattgcaaaatcattgtttccgcagacgcaattcagaagttatccacaatttaaacaacgaataaaaaagacggtctggaattatgggaataacttttcccacacttcaggccgtctttttcacttgttatccacaaaaacttttaacgatacgaataaagaatgtgccttgcacattcttgcgcctgcggcgttgctaagcgccagtggcgcttgtttagcaaggaccgaagtggaaacgtagaccgcttgcgacatctacattgtacgccgcagtgcgcatccttagcggagcgttttttatatattaggaaagcactttcctaatatataaaaaagctgccatactctctttttgagagcacaacagcttcttgtatatcttttctcttaattatttaccagcggctgccattgctgcattgatcttctctacaagcagatctgcatcgattccatgaaccatagctgcttcctcaagagactccatctgagatgacgggcatccaagacaatgcataccaatctccatcaaaatcggagctgactctggaaatgttaccagaagttcgccaattgttgtgcttttagaaattgccatcactgtttcctccttacatatttctattttcaattaatttctgtcacccttgaacagtaatctttattataatccctgatctatgatttagcaaccttattttcattatcattccatgaaattttctgaaattttcacacaactttttccgtttatcacactactcaaaagtcaatcagttttcttttttttttcgacaaatcgtcattttcataacaataaccaaaacgaatgttctttttatttccaaaagttatccacactattcacatctttctttgttgataatgtggataactttcaggaaatcttttatttttcctcattttttcgatttttcaatgttgataagttaaaaactactttttttcatttttttgctattttgaatattcttgtcatattttgtgcattttgactatccttatatttttcttgggaaataccgattttagaatttacagtcaaatctttcatttcccatacatattctggacaatgcattgttttctttctattattctttaataaatccgtctgacagccacgatatttgtatacgttgcactgctgataccaattccctgatcttcattcattgcatttacaatctgatcatttcctatatatagaccaacatgtccttcatataagataagatcccccggctgtgcgtcttcataactcacttcatatcccgcacttcgctgttcataagaagttcgtggaagacttataccaaaatgtgcatacacagactggacaaatcccgaacaatctgctccatctgttaaacttgtaccgccccacacatatggattcccaataaactgacaggcataatcaataacttcctgccctgacgcaactgactgagccgctgcttctgcagcctgggcttctgcttccgccttcgcaaccgcagcttcttctgcttccattcgtttttgttcttcctcttttgtctccccgtaagaataagaactttcctctgtaacataatcaccgcacacccagccattaacttcaccgacctgtatcggataccagccctctacaggatcttctgtcacaagatattcttctccctgattaatctgggttaatacggtagtatccgtcccatgtccctctctgacattcagacaatctgctgtgactgttacattctcatttgtatactcatctgacctcgaacgggcttcttcccctgtgaacaatgtttccgtcggaacatacccctctgcatttcccgaccggatctttgtccatccatccagatattccaacacaactgctgctgaatcagaatataattttccaacccattcactgttttcatctgcttcgcttctaatataggtataatcccccgtattagaaaacgctatattcaaatactctccctcttctgtcggcaccagatacagattgatgttgttctttatttctgtctgatatgatgcttccaaaatgttttcaattcctgtaaccggaaccagactcttctcactgtcatcagtttctgccgcctgtgttctgactacactccccggaattatgatcatccctgccatcattgacatgataagcttatgcttcatccgcatgttactcatataaaacctcctttatttccagccttatcttttgtgggaagttttaattgttacataattgttaatttttgttacgccgtaattttatcaatcaacaatagatgtgtcaaccgttttaatagttttttcataattatcaccctccaccatttgtaattattccccttttttattaatcttaacgtcctttttgttaattattttgtaatattttgtcaggagaaataaaaaaaacttatttttttctattgacaatttttaaaatataagttatattctaattacagtaatcgttatcgttattgattcaattttagaaagaggtgaatctatggctgcaattaaatatagccgacaacgagaagctatcaagcattatctcgcttcaacaaaagagcatcccactgccgacactgtttacctgcatgtcaaagaggattttcctaatatcagtcttggtactgtttaccggaatttgaatctgctgacagatatcggcgaagcgatcaagatccctacacctgacggcggagatcgatttgacgggaatgttattccgcacaatcattttctctgtacaagctgtggacggttactggatctggaactggatatgaagagtattgaagaagtgaaccggctggccggggagaatttcgatggaatcatcacttcaagttccactttgttttatggggaatgcagtgactgcattaggaagtcttaagttaaaaaaaattaataagaaaaaggagattatcattatgaaaaaatttgtatgtacagtatgtggttatgttcacgaaggagatgctgcaccagctgaatgtccagtctgtcacgcaccagcttccaagtttaaagagcaggaaggagacaaagtatgggctgctgagcacgttgtaggtgttgcacagggtgtcagcgaagatattcttgcagatcttcgtgcaaacttcgcaggagaatgctctgaagtaggaatgtaccttgcaatggcaagagttgctcacagagaaggatatccggaaatcggactttactgggaaaaagctgcttacgaagaagcagagcatgctgcaaaattcgctgaacttcttggtgaagttgtaacagacagcacaaagaaaaaccttgagatgagagttgatgctgagcacggtgctacagaaggtaaattcgatcttgcaaagagagctaaagctgctaacctggatgcaatccacgacacagtacacgagatggctcgcgacgaagctagacacggaaaagctttcgaaggactgcttaagagatacttcggctaatttaaacaaaccttatcagcagaagcgatctcttctgctatgataaaactgcccatcgggaatggaacatttccttcctgataggcagttttttaatcttctttctcttttctttcatctgataatttaacttttttgccggcaatgagtttctgtttctcttttctccctaactgcttaattgcatattcccgtttcattgcctgttcttttgtctcaaattcctcataataagccaattcaacaggccgccgtgccttcgtatatttcgcgcctttcccggaattgtgcgcctccacacgtttttccagatcatttgtccagcccgtgtataacgttccgtcactacattttagcatatatgtataattcaaaaactcatcacctctgctatctcccgcattactctttcgatgcatgttatttattatatcatgaatcccttatccaggatcaatactatattatcaggaaaacttttcttaaactttttcctgtatccaatacaatatagtattgatcctgcacccgtaatcaaacttttgaatccatcattttatccaaacaaatacaactttactccataaaattcatggggtcaactggtgccccgtctttcataatttcaaaatataaattgggtccttcgacactataatatttcgtcggtgaattcagtgttcccacttcctctccggctgcaatataatctccgactgctgccgccacttcatccagctggccataaaccgcagtatacccatttcccatatcaagtgtcacagtagttcctgtctgggcagtctgttcaatactctctaccactcctgctgccgccgcgtgaatcacttctccctgcgttccaccaataatcagtgcaggattatatttatactgctccaatgtcggaaaatatactgtatgatccatactaaaacttaaaagcgttgctccgcttgccggccaggcaagtgtgctttcctgagtaaaccacacattctgtgtatttgaagatgctgtgctttgaatttcctctgtggatgtatttccattctccacactgttttcattctcttgctgaacatccttttgggattcctggttttcttcattatcctcttctgaatctgtgtctgtaggaagaatatcatctgtattcgccaatgtactatcatcttctgtaagctgttctgctgttgtttgcgcatctttgatctgctgctccatatcttttttgtaatgattgtatgtgtagctcccaaccattgtaattaccgcaacaaaacaaagtactgcgccaactgcagctccctttcctttcaaaaaggccggtctttcatttttattcataatcatcacctctggccatagcattgcctgaaatgatcgatcttattcatctatgtggtgtagttctgttccttcgtaaaaaaattgcaggatctcttcataatttttcccatcctttgccatttcctgtgcagtccactgactcattccgaatccgtgcccttttccaacagttgcaatttttaatccatgcggaccttcataaaaagaaaatgaactcgaaggaagtttcagtgcatcacggaactgatctcctgtacatatcgtctctccaatcctcatttttctgacataaccggaagaatcccattcctgaatttcaaaatcttcgtatccatacccattttctgcttttttctgttcctctgccacaaggaattctctacatctcttttgtatctctttatattctatcaaatgtacctgaatttcatcttctgccgccttgtcaagcggacattcttttgctgtgatgtacggataatctgcattcccaagtacctcctgcacatctctggtctttccattactggattgatgaaacggtgtccatgcaaaggtctcatgataccacagtacaattccttttgtttcctgtactgcctgttgacattttttcaaattctcttcgtattttgtcccccactttttcttcatctgagtctgcgtcagacatttatccaaaagagtctgcttttctttctctgttctgtacaactctgtacgtagaacaaccgcctgtgccttcaatgcttctatttcacatccaccatctgtttctcctgcgagcatttctgcgagatacacagatgcattatcgctgtcagctccctgcaccgcattttttccgtttataaaaacagaaatgatgtaaggaagtaaaaacagtatgataagaaatgcaaaaaataactttattttatttctaattgtatcacgcataaaaacagccctccatactctattgtatggaaggctgtcctattttagaacttatctggttcattctccgtgtaattgcttattcgaaaaggtcctgtcctgatggaacttcaaccttctccagatgccagatatcacgcacatactcctcgattgttctgtcagatgtgaacttaccgctgcatgctgtgttcatcattgccatcttagaccatctctgctgatctctgtaagcttcttctactctcttctgtgcatctgcataagaacggaagtctttcagaatgaagtaagtatctgctttgtctgtacactgtgtattgagcagtgagttatacagattgatatacatgttgtgatcaccgtttgagtaggttccatccatcagctgatctaccacacgtttaacttcccaatcattgaaatagatatctgtcgggttgtatccgccattgttctcgtaattgattacttcctgtgagctcagaccaaagatgaatgcattttcctctccaacttcatgaacgatctctacgtttgctccgtccattgttccaagtgtcggtgcaccattcagcatgaacttcatgttacctgtaccggatgcctctttggaagctgttgagatctgttcgctgacatctgctgctgcgaaaagaatctctgcattggatactctgtagtcttcgataaatacaactttcagctttccgttgatgcttctgtcgttatttacaacatctgctacggagttgatcagtttgattgtctctttcgcacgaaggtatcctgctgccgcctttgctccgaagataaatgttcttgggtagaaggacatctccggatgctctttgatctgattgtacagatacatgatatgcaggatatttaacagctggcgtttgtactcgtgcagacgttttacctgaatatcaaagatagaacgaggatctacatcgattccgttatgttctttgatgtatttcgcaaggcgaactttattctgatatttaatttccataaattcacgtcttgcatcttcatcttctacaagcggtttcagttttgcgatctgagacagatctgtgatccatccgtcaccgatcttatctgtgatccaatcagcaaggagcggatttccatgtgcaaggaaacgtctctgtgtaattccgtttgtcttgttattaaacttctcaggcatcatctgatagaaatctttcagttcctgtttctcaagaatttctgtatgaagctgtgcaacaccgtttacagagaatcctgcaacaattgccatgttcgccatacgaacctgtccgttcataaggattgccattttgcggactttctcttcatttcccggatacatctcacgaaccttgatcaggaaacgacgatcaatctcctgtacaatctggtaaatacgtggaagtaattttgagaacaagtcgattggccatttctcaagtgcctctgccatgattgtatggtttgtgtaagcacaagtcttgcttgtaacttcccatgcatcctcccagcttaatccttctacgtcgatcagaagacgcatcagctccggaactgcaactgtcggatgtgtatcgttcatctggataacaactttctcgtgcagttttctgatatctccatgtttcttcttatacttctcgatcagagcctgaagacttgcagaaatgaagaaatactgctgtttcagacgaagctcttttcctgaataatgattgtcattcggataaaggacatcaacgatcagttttgcaaggttctcctgctctactgctttgtgataatttcctctgtcaaactcgtccagcttgaaatctgtgatcggttttgcatcccatacacgcagtgtatttactacatggttaccatatccaacgatcggcatatcatacggaacagccataacagactcataattttcctggataaatttatcttttcctgttacaggatctttctcgaaacggatatttccgccaaagcgtacttcttttgcgtattcttcacggcgaatttcaaatggatttccttctttcagccagttgtccggaacctccacctgatatccatctttgattttctgtttgaacattccataacggtaacggattccacatccatatgcaggatagttcaatgttgcaagagaatcaaggaaacatgctgcaagacgtccaagaccaccatttccaagagccgcatccggctcctggtcttcaatcacgttcagatcaatattcatctcttccagtgcttcttttacatctttatatgctgtcatattgatgaggttgttgccaagtgcacgtcccataaggaactccattgacatatagtatactgtcttggcgtctgtctcatcatatcttttctgtgtctcaatccaatcatcgataataacatctttgactgcataggatactgcctggaataactgctgcggtgtagcttcatcgattgtttttctataaagtgtcttaacgttatcctttactgccgctttaaaagcctttttctcgaatcttttactgaacatgtttattactctccttttttctcaacacccattgtaactacttcgccgttgatcttccattctttcacgtaaccagccggctgtgcttttacaacttcatccgcaagtacctcacctgcgatcagtgtattgttcttttcgaaaacagcttctgccttttcactaccctcgtatgtaactttgattctgtccataacttcgaaatcagcttcttttctcattgtctggatcttgctgatgatctcacgtacaaatccctcttccagcagctctggtgacaggtttgtatcgagaacaactgtgattccgttgtcatttacagattcatatccttcaatctgtgctgtatcgatcagaagatcttccttgaaaagttcaatttcctgtccgtttacatccagtttgagtgcacctgtagcgttgagctcatccattgctgcatttccatcgatgtcgttaagcgccgctttgataccacctaacatcttaccatatttcggtccgactgtctttaattgtggtttaaaactataagaagtaaagtctcttacatcatctgtaaatttaacatttttaacattcagctcgtctgcaacgatctcctgatagaattccggaagatcaaagtctgctttcacaaacatctttccgatcggctgacggttcttgatgttggatgcattacggcatgcacgtcccataacaacaaggtcaagaacatgttccatgttattttcaagttctttgtcaatctgctcttcatgaacttctgggaagtcacaaaggtgaatactttccggagcatccttatcaatgctgcgaaccaggttctgataaatctcttctgtcatgaacgggatcatcggagctgctgccttagatactgtaacaagagctgtgtacagagtcatgtaagcattgatcttatcctgctccattccctttgcccagaaacgctcacggcttcttcttacataccagttactcagatcatctacgaaatcctgaagcacacgtgctgcctctgggattctgtaattgccaagattataatctacatcttttaccattgtgttcatcttggagaggatccacttatccataaccggaagtttatcatattccagagtatattttgttgcatcaaaattatcaatgttcgcataaagcacgaagaatgcataagtattccaaagtgttcccatgaacttacgctgtccttcctgaacggcttttccgtggaaacggttcggcagccacggagcactgttgatgtagaagtaccaacggatcgcatctgcaccgtatttctccagtgcatcaaacggatcaacggcatttcctttagacttactcatcttctgtccattttcatcctgaacatgtccaagaacgataacattcttatatggagccttgttgaacagcagtgttgaaatagcaagcagtgagtagaaccatcctcttgtctggtctacagcctcagaaataaagtctgccgggaactgtctctcaaacagatcctgattttcaaatggataatgatgctgtgcaaatggcatggatccactgtcgaaccagcagtcgataacttccggtactctgtgcatctctttaccacactccggacacttgattgttacagcatcgatgtatgggcggtgaagctcaatatcatccgggcagttatcagacattgatttcagttcttcaatgcttccgatagagtgcatatgtccacactcacactgccagatattcagtggtgttccccagtaacggttacggctgattccccagtcctgaacgttctcgatccagtcaccgaaacgtcctttaccgatactttccggaatccagttaattgtgttattatttctgatcagatcttcgcgaactgctgtcatcttgatgaaccaggactcacgagcgtagtagatcagcggagtatcacatctccagcagtgaggatagctatgctcgaacttcggtgcatcatagagaagtcctcttgcatccagatcttttaatacttccggatcagccttcttcacaaacagaccggcgaacggtgtagattctgccatatcacccttctcatctacaagctgtacgaatggaagatcatattttcttcctacattcgcatcatcttcaccaaatgctggtgcgatatgaacgactcctgtaccatctgtcagagttacatattcatcacatacaacatagaatgctttcttgtgctgttttgcagcctcgtctgctgcacactgatacaacggctcatactcttttccttccagatcagttcccttgtaagtctcaagaatttcataagcatctttgccttcttctgcaagtcttccaagaactgtatcaagcagtgcgcaagccatataatatacatgtccgtctgctgccttaacctttgcgtaatcttctttcggatttacacaaagtgcaaggttggatggaagtgtccaaggtgttgttgtccatgcaagaatatatgcatcttcatcttttactttaaaacgaacgattgctgaacgctccttaacatccttgtatccctgtgcaacttcctgtgcggaaagcggtgttccacaacgcgggcagtaaggaacgatcttaaatcctttgtaaaggagtcccttatcccagatctgcttcagagcccaccattcagactcaataaagttgttatcataagttacatatgggtgctccatgtcagcccagaatccaactgtaccggagaaattctcccacattcctttgtatttccatacactctctttacatttcttgataaatggttcaagaccatatttctcaatctgatcttttccatcaagaccaagaagcttctcaacttcaagctctaccggaagaccatgtgtatcccatccggcctttcttggaaccatatatcctttcattgtacggtatctcgggatcatatccttaataacacgagttaaaacgtgtccgatatgcggtttaccatttgctgtcggaggtccgtcatagaaaatataatccggacatccttctttttcatccatacttttctggaagatttcattatcatcccagaacttttcaacttctttttcacggctgacaaaattcatgtcagttgaaactttcttatacatgttcttatcctttcctgagtttattttatgattcttaaaaaaagaaaggcttccgtcctgtaataggacgaaagcctgaacttctctcgttaaaccacctgttacatcatacttaggtctgatttctgacctgcatatggtatcctttaacgccggacacgcgtcagtccttactctctctttctgcagaaacctcttttctgcatctgtttcaggaactgctgctctggagtgatcttcaaaaatctcttacttgcaccggactcccaccatctccggctcgctgtaacgttcagataaatcctactgtctccgtcatcgctttacctgtgaacttctacacacggcttattataaagagattcttggctctagtcaaggtttattatgataaaaaaagtgcgaaaaaacgttgttttcagcgttctttcgcaaatttctgttttcttatctgcggcgtttcttctttcttttcacattaccactctttgcatttcttctttttcctttttttcttctgcgacgtcttatctgcttccggtaattcgcaagtacaacaatgatgatcaataaaatcacaactgcaattacaactccgatcacaattttcataaactttgaaatcccagttacgacagttgaagttgtcttatctttctttttttccaaaacagctgcactgctttcctctgttttttctatcgcagctttcacactgcctacttcctgccctttataagtaaatgttactgttccggatccatccttgttgctgtcttccttcacttctgctttcacatcagaaaattgtgcactcttcggaagtacgatataagcatcttcgtcttcataagacttcacaccttccggaagcttctgatccttcaaagatatttttgaaaaattactgtaagcataatcaaacatggcacgagtatctatataagcatcatttccaaaatcataaagtaccaccgcaacaagctgcatatctccgttatctgccattgtcacaagcgttgttcttgcctgatctgtgtagccggtcttaccgcccttgcagtattcataataattatcattctgtggccagagcatcttgtgcttctgctgaaaagtacgttcttcattcaccagattcgttgccggaatcgtatggcttaacgattgggaaattgtccgaaacgcttccttctgataaactgctgcaccaattcttgccatatcatgcgccgttgtataatgttgttcatcatgaagtccgttcgcattcgtccagtgtgaacctgtacatccaagtttttctgactcatcattcatcgcctgaataaatgtgtcataacccccacccatcttcttgccaacactctcagctactgcataagaaacctcatttgctgatgccagaagaacggcatagagcgcatcttccatactgatctgctcccccggtgtcatgccgatatgggcatcgccatattccagaaaggaaatgctgtcctgggaaaattctaccgtatctgtaagctctgcattgtccagcgcaaccaatgttgtcagaagttttgtaatactcgccggataatgcttcttttcaatctgcttgctatataaaactgccccactgttcatatccataacgattgcagagtccgcataagttgccggtccctgtggccagttctccacactgtttgaatccggtacgatcgcataacagttctgacgctgtgtctccctgtcttcttccgctgtctgagttgaatctgttgtggctgccgccgtttcttcctcagcaaatatctgtactgccggcattaatatcatagatgccgccagaaaaagagacagacagcgctttccgtatttcttaaaatttatcataaaggaaatcctccggttgtttgaattcataacgcaaaaatccccacagacctttcatctgtggggaatctgtgactattattataattctactaaaagtttttttcaatagtccggaggctattttctttcaactatcgaatctcttccatcatgatttctgctcccgcagcctctaccgcaagactgtctttctgtggatagaaccgtgtggtgaatacatactctccattatttacaaatacttccacagaggatttatccacaagaatttcaacacttgaaattttatctacatcaacataacgcattcctcttcctgcagatacagaatttttatcctgacttgtgaaatgcatctcaaatcttccatttttgtactcaagaatcaattcttcatcaatcactgtcctgaattcattgttctgaatgcccgagatattcacatcatagactttatatccatcttttttcaacattccggctgacttatccacaagagttttcctcttttgcaattctctgaccggtctctgacaaactttaccgtctttcacaaatacttctctcgggaaagtgaagcagtgctgccacccttctgcgatcgtcagattagtatattctttacaatccggcattcccatccagctgatgtgaacccttcttccatcttcagtctcaaaactctgcggtgcatagaaatcaaatccgtaatcccaaagcatgtattctgaaagtttataatcatctaaaatatttccatcaaccatgaaatatcctgactgataaacatttctgtcatcccatactccgccttcaagtccctgcacagaagcagaaagaatttttgttccatctacctcaaagtaatccgggcattcccacatataaccaaacggtttctctgattccacacggcttctgaacttccagttaatcttatcttttgactcgaagatcaatgcctgtccgacatcttcttttgtacgtgcaccctgaatcatgtagtaagtatctccgtctttccacaccttcggatcgcgcacatggcaagtcagatctgacgggtaatccacatttctcatcagttctttttttgatccaaatgtctttccatcctcactgacaacaagaaccgtatttgactcgcgtcctgtgttgatatagtcaaaatctccgtcttccagctttacattgcctgtatagtaaacatacattttgtcatcttcgataaatgctgatccggagtatacaccatgacagtcaaatggctgatccggatataactttactccctggtattcccagtcgatcatatctttgcttgtatagtgcccccacatcttcacgccgccttcggcattaaatggagaatactgaaaaaatgcatgatagatcccattcaactggcacaatccgttcggatcattgagccagccaacaggaggcatcagatgcaacttctcacgataatccgctccttctttctgccctttttctttcatcatctcttccgtcatatctaccagtttaatcagatcccttgttaatgcattcatgctcttgtctccctttttccatttacagccgttctattctgcaagaattcttctttgaataaaacggctgtatctttttaatcactgttcaatttatttctcaatcttcattgcgagatcagctgttgtaactgttcccgctgctgtcttctctactttgctgaagtcatctgcattcgtcagtatcatcatcgtagttgtcggatgtcctgctgctttgatagcatccagatctgcttcgatcagcacatcgcccttacgaacctttgctccgtctgctactttctttacaaatccttttccatccatggaaactgtatcaattccaatgtggatcagaagctctgctcctgcttccgttgcgatgcatactgcatgccctgtatcgaagatattcattacttcaccgtcacatggtgctacaatctttccatctgttggctcaactgcaacagttgttccaagcatctctgatgcaaatgtctcatctgctacttctgctgtcgcaacaacatttccgtttaccgggcttgtaatttcttctgctgaaacattttctgcttctactacattctctgtctcttctgttttctcaactgttgtctctgttgcggctgtcttaactaccggctctttatctttgtaaatcatgaaggagatcacaaatgctactcctactgaaattgccatctcgataatgtactgaagcggctgattcaggcaaagcaggataccgaagatacctgttactccagttccttttgctccgagatgtacaagtgatgcatacaatgctccgcatcctccaccaatacatcctgcgataaatggtttgaagaatcttaagtttacaccaaagattgccggctctgtgattcccataaatgcactaagtgatgacggaagtgcaagggatttaatcttctgatcttttgacttaacgccaactgccaatgctgctgcaccctgtgctacattcgctgcacttgcaagtggaagccaataagttactccgtattttgccagctgaccaatatcaatggctgtgtacatctgatgaatacctgttactactgtcggtgcatacaaacctcccatgatcagacttccaagtccgagcggaagtgtcagcatccactggattgctccaaggatcgcattctcaccccatacaaagatcggtcctataatggaaagtgtaagatatcctgtcacgaatacgctgacaagtggtgttacaaacaggtcaagtgctgccggaaccaccttgtgcagcttcttttctaatacagaaaggatccatactgcaataatgatcgggattacatgtccctgatatccaaccatatcgatgtgatacagtccgaagaatacgctctgtgtctgctgtacaccttctgttgcaactgtatatgcattctgcagtgacggatgaatcatgatcataccgataacagctccaagatactggtttgcaccaaatgctttcgcagctgaaaatgcaatcagaatctgcagaaatgtataagcgatattactgaacagattcgcaaacacataaatagaactgcttgtatcaattgctaaaaatccatttgcattcatgaaatccagcgcattcatgattcccatcaggaaaccacttgctacgatggccggaatgatcggtacaaaaatatcacctaacagcttgatggccttcataaaccagttctgcttctctgccgctgcttcctttgcctcagcttttgtgcttgctgtaatacctgcgatcgcgataaattcatcaaacaccttattcactgttcctgttccaagaataatctgaagctgtccagatgcctcaaatactccctttactccatccacattctctattgcctctttatctgccttactattatctgcgataacaagacgaagacgcgttgcgcaatgcgctgcggatacaatattcttacttccacctacatatcccagaatctcctgggctgttttcctgtaatccatgattactctcccttccttctatgttttatgtgtaatcgttttcacatcttatgattttatattaaataaaaaaatgccatttgtaaagatggcatttttactaattctgattcttctgttttgtttaacttgcactatactcttagttacgttcattcaaacctattcacgatctggaatcccagtttcatatgcaccggcaccggatttttctcttcaatctgttcaagcaagagctctgcccccttgattccactcgttttatacccaaaatgaaccgttggaataccgcctgtcacagcccttaacatctgattatcaccaaatcctgtgacacagataccagactgttccaaaatgtgtagcatccttgcaccagaattctgaaccgactccggaaccgcctttttactctgtgcgatcaatgcctcgattgctcctgctgcaatcgtatctgttgcgcatgatatgatatcgattccattttcttcactcaacaaatccactactgcttcatatccgccgctcattgtaaattctgattcgcgtctgtaccgatggtcatcgaaagtaatccctgcttcctgaagtcccttgcggaacccgtcttctctggcagcacctgctgccttatcttcacgagtaacaccaatatatgcaatcttgcaatcttcaggtcttccaccattccgcttcagtgctttcaccgcaacttcttgtcccattgctcttcccgcaccaaaatcatcatgatagatacagcttgccatttctgtctcctgtcccacaaccacaaccggaacctttgattcttttaaaaatctccgatgctcgtctgtaagcactgtaccgatcagtacaattccatctaccggataactttcaaagattctcagataagtcagctcattctttggctgattatccgtgcttgcaagaagcatctggtaccctcttgccgaaagaacctgttcaattcccgctgtgatccggctgattgattctgaattgatcttcggagccaccacaccaaccagatgtgcacgtccggttcttaggattcttgcctgagtagacggctgatatcccgtcttctcaatcactttacggatctgctcctttttctgttcactcacatatccgtcattcaaatatcttgatactgctgcgctggacaccccggccatctgcgcaatctcttttatcgtcattgtatactgcctgcctttatttccctgattttcgaaattatccagatccattttcgctctttttctagctttgacctgaacctgaatgacattcacattttaacattcaacagacaaatatgcaacgacgttgcgctacatcattctttatctacctgttactgttcacacgatgtgcgaccagcaacgcatctcgccattttaaatcgcctttggcgatggggcgagatgcattcaagtcaaaacacgcatcctccgtgtcaatcagcggagtgattgacacgggagtgaacagtaatatcatataaaaatccataaagtattactcttccattcgtctgatcgttagaacaagtagataagccaatgatcctgttccacccctcttttccttttttctcaggaagacgatactgcacggcatgtgcctttatatattccatcagttcttctaggttctctttcttataatcttgtggattataaataacttcatcatacgcatccgtctccacacaggcgaaccactggattttttctaactgttcattcaaatatagcgtacctgttttgtgcgattcaaaatactccttttctttataattcatcacatccccaaacattgcgccattatccatatggtgaccatataataaactgtaactgtcaataaattttctgtcatttctgctatccagaaaaatacttcctgaaagagcaaactctccataaatatcctgattaatatattctagatttgtttctccctgcacaaccggataatcaatctttgttccgtctaccgtcagccaggcacacacatccggattgattttctgaagttcctgcagggacggactttcatccgttttccctgcaggtttatatttcatcaattctccactgataaacgcacgtcggttgatctggcaggtgtcccataatgaataggcaccataaagaagcataagaataataaagagcgctgccagaatttccaatatcttatttcccgcttctataactttaaaaaacagctcttccctctgctcccctgcctcctgaccttctgtcgtttcgtttatcatgctctttttctacgaaagaaaactgatccaaatgcgcctgccgcacccacaagtaatacgtatggtgtgtatttctttgcaacgcctgttactacagccgcatctttctcattcacatactgaactactgtaccatcttcttttgtagttcctgtctttgttccggtcgcagttgtttctccatcaatcgtagtagtatatccatctttattcgcatcggtctctgttaccgtgtatttatcagattctgtcaatccataaattgtaattgaacctgtatcagaaatctgataagaagtttctgcttcattgcttgtgatgtattctgtaagtgcctgtgcatttgcatttttcttcactacaactttgtagagttctccctgtccaccattcaccgcaaccttgaattcgaaggatttatttttaactccctgattacctgtgatcgtttttttgatcgtcacatcatgcgttgtatcattttctgcaccataatcattgataaattcaagatcacctttttcaccattattttctgtaattacatttccaacataaagtgctccatctgctccgttatatacaaaaagataaacatctctgcctgctgtatcataatcgattccttcataagagcctgcatcttcagtcacaacataatgataaacaccagcatgttcaaatacctctgtattaatttccaatgttgcattcttgctgtaagctgctgccagtgtatcttctcctgatggctggaatccgattgtctgagaggccgtgattccacctgtcactccggcatatactacattatctctccaattttctgctgcttcaccattctccacatgaaacgaaaatgatgtatttggctggtatgtatttccatccgttgtcaccgttttcttcaaattcagctgtgtgattggctcattttcctcggctgacgcatttaccacacaaactgacatcatcatcatactcgccattgccattgctgaaatacgtcctgctgttttcttattcataatctctacctcactttttactctgatttccgggtttcagatatctgaccggcggagcaccgtaattactctgccttttatctccttgtccttcacagctccaaaataccgactgtcttttgcatttccccgttgatctcccagaataaaatattctccgctattcagcgtcagtggatagaccgtgtcactttcgtattgcggtgtatcatagaaaatatcattttccacaatcttacttccattgatctttaccttttcgtcctctgtaatctctactgtatcgccgccggctgcgatcactctgcccacatatttctctcctgctttctgaagaaccaccacatccccgcttttcggtttttccagtcgataataaaagagcagatctcccgcactgatgcgtggcgacatgtcattgtttttcatggttgtaatcccaaacaacagcccgaataaaacccacagaaacaccagaagaaatgcaagacgaatcagaaaaagatgaatctctccttttaatttcatgaatctttttctttcctctttcttcgaagaaacagaaaaactgctcctcctgttatacctgctgtttccatcaggattgtaggaaacatcctgttctctactcctgtcggaacaaccataagcggttgatactgattcgtataagttactgttgccgtctgctccttcgttacatcaattcgtgctgtcatcccctctgcctgactttcctgtcccacgagataaaaggtatgctccagcctatagttattctgttcctgagcaatctccgtcactgtatattccccaggttcaaccgcctggagcgatgcactccactgaccattttgcggaatctgcacttcttcgatcacttcttctccccgttttatctgaaatgtaaaggactcgtccggaatctgacttgctgcaattccttccacctgctttgtgattatcagattacctgttttggccggtgggtttggaagatcctttccaaaagaaatgttatcgagcaggtttccatttgacagatttccatttgctgccgctactgccacaaaataaaatcgagtaacatattgccctgccggaactgtataatctccatagtgataagtccatttcccagttttatctgacaataccgcctgcacatcaggattactctgatcaaatccagatcctgccggattccaatcagaactcattgatttcgtatcactgatgataaccgccatcgtgtctgttccccagcgtccggcatgttccaatccccagtgaagaactgtccctggttctgtcaaaacatcctgataaagagcccctggttcctcacagtttaattctgcgaactgatttccctgtgccgcactgctgatgttataaaccggttttggatcattaaccgtatttccataataacttcggcttccatctgcaatctcgatataataatctctctgagttccagagccaaaatatgcacctttcgctgttgttttccaatataaatcattcgttccatttgctacctggataaaatgtgcattcttataagtcagtgttcctgcatcacatacttttggcgtctcaaaacttccattctgaagcttgtcataataattcaccttgtattcggaagaataaactgtcaccgcttcatttactgtcactttcacacgaaatgtcttctgtgcaccatctcttgcaacttcataggattgctttctactatccacagtcgctgtatcctcaatgtctttccattgaccattttcacttacctgccactgataagcaatctgatctgattctgttgttccactaacctctgctgtcagagaaccttttgtaagaatctcatctttaagagcaactgaaattttctctgaatcggtacttttcccttcctctgttactactccagactcagggggagattcttttgcgtctggtttctgcatttctgattgggaagtctcttccgcatctgtttcttccgggagcacggtacaatctgttccctctgtggtttgtacagcctcaacttgtacaccttctgccagtacctgaacacccatcaacgacagcatcatcagtaccgccatcagaaatgcaagatgtcttcttaactttcttcgcatcttaccctctcctgtcttaaattgaattgttacctttcagaaagtgctgttgatatattttatatcagccctcctgtctaatatatgtatgtccctggatttctgattatgacttgaaagagataaaattagatttctttaagattttttacattttttaaaattttctcttgcaaagaccatttaaatatgataatatatttttcgtcgataagacaaggaaatattcctccttagctcagtcggtagagcattcggctgttaaccgaagtgtcgttggttcaagtccaacagggggagttaggaagaacatctcacagatttcgcgctgtgggatgtttttttgttgcgtaaatctgacacagcttgtcagatttttccttatccagtagctctaaaatgctacacatttcatcgctgtggcgtatccctagcggagcgtttttttgtatattaggaaagaactttcctaatatacaaaaaaacggactgtgcaacgcacaatccgtaatcctagtggagaatacgagagtcgaactcgtgacctcctgcttgcaaggcaggcgctctcccaactgagctaatcccccatatatatgtcctcaacagaacttctatatgatatcatagcttatcgagagtgtcaaccctatttttaatatttttcttttatttttcctaccggaatccaagtaaccagatcaacagcggattatggttgtacaaaaacgtcaagatcgcgctctgctcaaccatcgcataacacgttgttccaatctctgtcgtataaatcagagtcagcacaaggaatgcgatccatacgataataaatcccagaccaattccaagcactcctcccgccagatgattgatcgcaccaagtaacggaagttcaccaataatattcaccgcatacatcaatgcgcttacaagaatgatcgcaatcaaaaatgtcacaagaaatgacacaacattgaggagcattcgtgaaatataggccgcaacatattctgggaaagttgtaacatccagttcttcataaatcgcagtattattattttccagcaatgcatctttcaaaaactgtggcagcattgaattctcaatctcacggatctgtgtatcctttggaagatctccgaccactttcaggatatcctgtgcagttatccccagtttgtcccatccagattcgcttaatgatttaatctggtctaccgttaaattctccagaggtgttccactgagattcgctttcaacagatcatctgctgaaagctctggcataaatgcttccactatcttcttctccagtacgtcctgcgccggtgtatgcttcatcagcgcatccgacacgtatggggaaaggaatgacaccagtaccagtgtcaatattgttgacagaagggataaaccaattctgagaaatcccttcacaaagccggcaatcatgcagactaaaaacacaatcccgactgcaagtaacaaccaattctccatatatctctcctatcttgtcaaataaacaattcgtagttcattatcactcatcacatagtatctgttcaggccaaatgcgtcaaagatttcctgcgcatctgctcccaggtctcccttaaacttcaggattcctgtcgttgtataaatacagcacttacttccatcatacagaatgatattgtctccatccatctttacatgactataatctccctgtatttctctactgaacacagtatctcctgattgattatacattctcaactcataccctgacttctcctgattaagcaggacaaatccaaaataagaatccgaatggaaaacacttcttatctcctggttcaccttcacttcttttgtctgcttgggagtatcttttcctgtataaatctcaaatccattatctccaactgcaacggatctgtcatttcccataaagaaaatctcgccgatcagcatatcttcataagtatctgctgtcactttgttatctgccttctctttgccggcagcatcaaaattataatatccgatcctgctctgcacctgtgttcctttggtataaagataagaaactgccagaacctttccatcatcagacaaatccaatgcgatcggatatcctgtatttccaatcgtaatctgctgctctaccagaatatttcctgccgcatcataggatatgatcttcggtgaagtctcatcttttaaaattgcactgacaattccctgattcgatactgcgattctctcaatcggtaatgtcgtctgaatctcacctttcaacccattttttgtaaatacgagaatactgttgcctccgctgtcagcaaccgcaaacacatcgtctttcacaactatcaccggtgtctgaagctgtgttggctgaatccacttttcctcattcttcttatttagaaataccacaccgtcatgattataacgcacaattccatctgcaaactgaacgtaattattcctgtccgaaaggtctttcgcgtaactgtctgccttgcggactgtgccataagtcttactatctaaaaggaggtatgttccgcagattgccatcgcaatcagaatgatataggtaagaagttcttttcttctccggcgtttgatccttctttccctttgtctcagcgcttttctatcatcctgcgtttttaccacctgtaaattcgacattttctttcgcgccatattgctccccttatcgtttgtccagtgcacctttttctgttgatacacttttagctttcacttgtctttcacagtataacacggatttatggcaatatcaatttttgtccaatatagatcaggttcccattctgcaatccattcatccggctgatcgcatctacatgattaacatctccatacatttttttactgataattgcaagggtatctcctttttccaccacataaataccatcattttcatctgctgcaacggcagtcccggaaaccggaacactttctgtattcttatcttccgtctgttcttccccttcattttcttccgttatctctgcggattccttttctgtatctgctgcttcctgatttttctccacagtagctgctgctccactcgtctctttcacatcaggtgaggatgtttgcttttccccctcggcaaccacatttatcttattctggagggatttcattttgctgaaattattcatcatagaaacacccatcacgatcaggaccagtacaaggcatgtactgattccatacatcagactgcctgtccttctttctcttttctgaccgccccgttcacgtaccagagaacgaaagctttgtgcagccgtatcttccacattttctgtctgaactgccccatttttttttcgacttgcaatcatataattctgcatgcacggattcttctcgtaataagtataatgtcctccaatttccatcagatctcccagcttatgtacaaaaaatacatcttcctggtttgtcgaatctttcataacaagaacggtatttttctttggaaataattttttatgcagctttacgttgatagaacccggagccagctgtaaatcatgctctgtcacaaaccagcctataatttctccttcttcaaaatactggctgcattcttcacaaccacatttccatatcttgtcattgatcaggtattcaccgccctccttttttaactcttttatttttatcgcaccataaatataaatatattcttcattgtcctgcttctgcatttcaccaatcagaaaggctccttctggttgtttttctttctcgcttttttcacttaactgaagaaaaaaagtatctacataatcttccacatagatttttggactatcactcacatttcctatctgacgcacattttttggaatctgtctctccattttatactcacctttctatcacttttatttaatttcccggggattgcccttaacatagcacaaggaaatcgggagattttatcaattagtgtcaggtaagttcgacaaatattacttttcgtgcacggcattttcttaatatctccaaacatcaaaaaacgctccggtactctctgattgcagatatcctgtaaacagaaagcgcgaagcgttctttttattagattattgtaactgttcagagccaacctccaaaatgctacgcatttcgtcggtgtggcgtatccgccaaataaaatttcaaaaacagtcttaaaaatgcaagcattttacacctgttttatgaaattttgcttggctctgaacagttacagattattttgcaaatgctttgattttctcgtagatgctgtctgtatcaagaccatacttcttcagaagctcaagtgccggaccagactcaccgaatgtatcattcacaccgatcttcataacctgtgtcggagctttctctgagagtacatcacatacagcacttccaagtccgccgataacggaatgctcttcaactgtaacaacttttcctgtctcttttgcagctgctacaacaagttcctcatcgagaggtttgatcgtatgaatgttgatcactttcgcatcaattccgtctgctgcaagcttctcagctgcttccagacagttacttacaggaagtcctgttgcaatgatcgtcaggtcttttccttctcttaacacaacaccttttccaagctcaaacttgtagtccggtctgtcattgatcaccggcactgcgagacgtccaaatctcagatataccggtccctgatgctcgtaagcagcacgtacagctgctcttgcctctacatcatcagctgggttaattacaaccattcccggaattgtacgcatcagagcgatatcctcattacactgatgtgttgctccatcttctcctacagagattccggcatgtgttgcaccaatctttacattcaggtgtggatatccaacagagtttcttacctgctcaaatgcacgtcctgctgcgaacattgcgaaagaacttgcaaatggaacttttcctgttgttgcaagacctgctgcaacaccgatcatattagactcagcaataccacaatcgataaaacgatccggatgtgctttcttgaatacacctgtctttgtagctgctgccagatcggcatcaagtactacaacgttatcatgttctgttccgagttcagccaaagcattaccgtagctgtctcttgttgcgatcttttttacttctgacataatgcttcacctgctttctctaattcttccattgcaatcttgtactcttcatcgttcggagcttttccgtgccatcctacctggttctccatgaaggatacaccttttccttttactgtcttagcaataatagctgtcggctgtcctttgactgtctttgcttctttgaatgcagcatcgatctgatcaaagtcatttccatcaatattgattacatggaaattaaatgcctcaaacttcttatcgatcgggtacggagagttgacttctgtaattgctccgtcaatctgaagattgttattatcaacgataacaacgagattatccagttttctatgtgctgccagcatggaagcctcccatacctgaccttcctggatctcaccgtctccgagcagtgtgtatactctgtagtctgcattgtcaagctttcctgcgattgccatacctacagctgctgaaattccctgtccaagagatcctgaagacatatcaacacctggaatgtgtttcatgtccggatgtccctgcagataagatcctgtatgacgaagtgtcacgagatcttccttcgggaagaatcctttctgcgcaagtgtagaatataatcccggagctgtgtgtcctttagaaagaacgaaacgatcgcgatccgctttctttggatctttcgggtctacgttcatctcttcaaaataaaggtatgtaaaaatctctgttgctgagagagatccacctggatgtccggcctttgcgctatgcagtgctgttacaatccctttccggatctcattcgcagttttcataagctctaacttgttcatgatatctcctttttaatttccattctgattccattttcagtcttaacgttatttcccggattactcaccaaaaacagcaatataatcctttttaaacttctcgatacctgcatctgtcagtgggtgatgtgtcatctgctcgattaccttgtaaggtactgttgcaatatctgctcctgccagtgcacattctgttacatggattggattacgtacacttgctgcgataatctctgtctcaattcctgctacttcgaacatctctacgatctctgcaatgaggtcaactccctttgtagaaatgtcatccagacgtccaaggaacggagaaacataagtagctcctgctcttgctgcaagaagtgcctggtttgctgtgaagatcagagttacatttgtcttgattccctctgctgtaagaactttaacagccttcaggccttctactgtcataggaatcttaactaccatgttcggatggatctttgcaatctcacgtccttctgcgatcatgccttctgcatctgttgttgtagccttaacctctccactgatcggtccgtctacgatagatgcgatctcagcgataacttcttcaaaaacacgtccttcttttgcaatcagagacgggtttgttgtaactccgcagatcactcccatgtcatttgctttcttgatatcctctacattagccgtgtcgataaaaaatttcatttttaagtcctcctatacatgaatcttcctcttaccactgatacaactcactgtttttccagcagtaattcgtttgtttatgagctgattatatagcttccaaaacctgaggtcaactgtctgaaaaattattaatagtcatttttcacttaataatccgacatattaaccgtttttattaatattagttaatatcaattgtttctcttctgtataaaagtctttattttaaaggctttatcaacattttctaaaatcagaatcgtttgtttttgttgtttttattagtaataattttattattttttattaattttaaataatccagcgtctatacatcaactattttgtcttcgcataagacgttgttccacgaaccacgatctgtggctcatattccacatgataaatactgaccggttcaaattccgtatacttccagtcccttgaactgatctttttcatgatgatatcacaggcatccattcctttgtgaactacaaaatgctcgatcgttgtaagtgacactttcttaactttggaaaataaagtattatcacatcccataaccgagacatctccgggtactttatacttcatatcctggagtgcatccataatcccaaatgcttttacaattctgttcttccttccaatgcccggagcagtgttacctcatcaatatattccagatcaccaccaaccggaacaccactggcaatcctgctcaccttgattccgaccggtttgataagtttactgatatacattgctgttgtctcgccttccagactggaattcgtcgcaatgatcacttcatccacatctccctgcagacgctccatcaattctttcagacggatatccccgggaccgattccaagcattggagaaattgctccatgaagtacatgatagactccattgtactttccggtcttctcatacgctgctagatcacgcggtgtctccactaccatgattgtcttatgatctctgtccggattgctgcagattgggcagatatccttatccgtcaacgtacagcactccttacagtaacggacattcttgcgggcatctacgattgcattagcaagtccttctacctgctctaccggcatattgatcacatgaaatgcaagtctttgtgctgatttattcccgattcccggaagtctcgagaactcatcgatcagacggctgatctgattactgtagtaatccattagaacattccgcctccaagaccgccaaatccgcctgtcatcttagatactgctgcatttgtctcctgctcaacctgacgcagtgcttcatttgtcgctgctacgatcaggtcttccagcatctcaatgtcgtccggatctacaacttcttctgcaagttttacttttgttacttctcttttgccggatacagttacttctactgctccgccgcctgcagctgctgtgaactcttttgtctcaagttctttctgctgctcttccatctgacgctgcatcttctgtgcctgcttcatcagattcgccatatttcccggcattccgccgcctggaaatcctccacgctttgccatgtctaatcctccactgttatttccatatttattttctgttctatgtccacaaatgtatcctcaaagtgtctgccctcttctacatgacggacatctacctcgactttctttccaatcttctcttcaatgagctgttcaagttcctgcacatgatcttctctgccaaccatatctgccgacatagcatctggcagtacaatcagcaaacgattgtcaccaccaagactcagtcttgcttttttaagaaagcctctgatcatacctgacgcttcatctgcgatagaacggaaattcttcaccacttcctgcacatcctccggaattgcattcggcagctccggtttcgccttcctgcttcccgcaacgcctgatccggatgatgacgcatcatctccattcacgtaaacaactcgctgcggcatatctgcggctgcagcaagtcctttctctactttgtcttctaccgcacggattctgtccagaagtgcatcctgaccagtctccatcgccggagtgcaaagcttgatcagtgcaacttccagaagtactctcttctgcgttgcatacttcagctgaccggaaagttctgagaatatacggatataacgcaacagcatatcaagttcgatcatctttgattcttccttgagctgcagcatattttccgtagacacatccagcacgtcctctatattatcagaagttttaaccaaaagcaaatttctcagataccatgtaaaatctgcggccagctgggtcagttcacgtccctgcataaccagatcttccacgatatcaagaactccggcaacatctctttccaatactttccgaagcaggcggctgaacacatctgtatccaccgcaccaagtacttcaagcacatgatcatacgtcagcttctgtcccagataaaatgcaatacactgatccagcagactgagtgcatcacgcatagatccgtctgccgcctttgcgatatagcgaagtgctttttcttccacttctacctgttctgtctgcatcagatcacgcatacggtctgtaattgtctcaatgctgattctcttgaaatcatagtgctgacatctggaaagaatcgtaattgggattttatgcacttctgtcgtcgccagaataaaaataacatactccggcggctcctcaagtgtcttaagcaatgcgttaaatgctccgatggaaagcatatgcacctcgtcgataatgtatactttatacttaccttctgtcggtcgatatgtcacttcctcccggatctcacggatattatcaacaccattgttcgatgcagcatcgatctcgatcacattcattgaagtgccggcagcgatagatttacacatctcacactctccgcatggacttccatttaccgggtgctcacagtttactgccttcgcaaatattttcgcaaccgttgtcttaccggttcctcgcgttccgcaaaacagatacgcatgtccgatcctgttcgccttaatctgattctgaagcgttgtaacaatatgatcctgtccttttacatcttcgaattcagaaggacggaactttctgtatagcgccgtatatgacatgaattacacctcgtctccgaagctgataccgattgttctcgcttctttaatcagaccacagttcggatcaacatatttcagctttcctgcaacctcttccaacggaactttcactgtctcaccatttctcatggctaccatatatccgtattcttcattcaggatcaattctgctgccttcgctccgactcttgttgcaaatacacggtcataagcacaaggtgtgccacctctctgtgtgtgtccaggaactgtgatacgaacttccttgtctgtctctttttcaatctgttctgccagttcgtaagcaatagaaggatattttctgtttgccagcttctctttgtattctttctttttcagttttgcatcttctttggaaatcgcaccctctgcaacagcaaggattgtaaatctcttacctgcctgtgtacgtttgtcgatcacattcttgattgctttaatatcatatgggatctccggaagaagaattatgtctgctccgcctgcaattccggcatgcagagttacatgacctactttgtgacccataacctcgataataaatacacgactgtgggaagttgctgtcgtatggattctgtcaatcgtatctgttgcgatatcaactgcactctggaatccaaatgtcatgtctgttccccacagatcgttatcgatcgtcttcggcagtgtcactacattgagtccttcctcacgaagaagatttgctgtcttatgagttccatttcctccaagaataacgagacaatccagatgaagcttatgatatgtgtgcttcattgcctccaccttgtctattccatccttatccggcacacgcatcagtttgaacggctgacgggatgtaccaagaattgttccaccctgtgtcagaattcccgagaaatcctttgatgtcaacatattgaaatccgaatagatcagacctttgtatccatctttaaatccatagatttctacatctttgcgcttgttgcaaattccttttacaacaccgcgcattgctgcgttaagtgcctggcagtctccaccgctggtcaacattcctattcttaacatagcaactcctcctattactctttgcacctgtcttaatcagttactttcttttcttgtttataagccctaaaaaagcagttggttcttctttccctgccgccattcctgatattccatgaccggcggctaccaactgctttttattataccttatttacaaatgctgctcaagaaattttagttttcgttatgttaaaaattcttccagaatctgacgaatcgccgcttctctttctgcatttcttcctgaatctcgctccgaatctctatctacgtctctctctgaatttcctttcggattccttgccggctctaccgatcttgcttctccctcgatattgatcggcagctccgtcctctctgcttttgttttatttccattctgtacgttgtcttctctgtgaatctctctttcccctttcttttcttcccactcctgctttccggtattctctgcagcgatcacattcaattcttctctatccgtagtccgctgtctctttacgtgaaatgcacaattattctcaagataatccaccatatacatcctgacagcattaagcttgtactgttcgtccgaaagatgactgataacaaaaaggagtaccatctccgctaatcctgtttctatatattgatacgccgcatctgaaaatccataagtaatataactttcgaatgcaccaagagctgcaagaattccaacaaaccacaccgtcagcaattccatctgtctccaggtatgaatcccaaacaaaaatcctctatattcataaatatatttctccacaaatgcattcgtattctctacactgtcatgcaccatacatgcatgttcgtattttgctcttacgagttttatcagtcggtgtgtactcttggacatattccctgccgccttcagcatctgattcaatgtctgctgattcactgcttttgccagcactccgattatgcccagaagcgccatcagataatagatgactcttgtgttcactgccagttctcttaacatagcaacccctcctggttttaaaaatattgcgcgtaactgttcgggcctccccttcgttacgtttgtagatattataaacctgattttatattctgtccgcataaatcgttctacagatttctacagcaaaaatcaaaattgtcgtattgaggaaaattatgctgaaagatgtgaaaagaaaaattgtttttttatatttgatttgctataattcaaaaggtaactaaaagatctaaaaatttaaaagaaaggatatctagatatggattatagaacaaaaggtgtctgttcccagagcattcactttgatatcgaagataacaagattcataatgtttccttcgttggcggatgtaacggtaacctgcagggaatttcccacctggttgaaggaatggatgtagatgaggccatctcacgcctggaaggaatccagtgtggattcaagaaaacttcctgcccggaccagcttgctcaggcactgaaagaagcaacaggaaaataacttaaaaaatggcaaactaatagggaaggatcgctactcttgattcaatccttcccttctgccctactagtccatggactgattaacagccgcttatggtgattatatgctcatttattcaattgtggtgtatcaaggaacaaggctctcacttttatctattagaatctaatttgtgagtatccgagcgaaccaccgcgcagcggctgttaggccagcccacgggctgcatcttctgccgttggtgtgggagaaagatgcttatgggactaggatgccgttggttacagagaatgtttcttcatccggagaacctgccatacatacaatgtgagaagcatgaactcgatagtaatatcctctgtcaacttgaattgacttcgagattgccgaatagtaatcattctctactttctttgaaaatgcatcaatctgatgccactttccgtctttctcattatatttatctacataaacaataaccgcaataacgtcaactgtatgattagcagttgttgatccataggcatagattctttttgttcctgtttttgagattgaacactgaccatccatcagatgttctcctctctcattatttttcggtgtataacctgtagacgaatctgctgatgtcaaatatgagccatcaactgactttggagcactgtcgtctgctttaacatttgtcaaagatactcctaccacacaacagaaaaccataacacttgttataactgatgcaatttttttacttatcataagactatcttccccctcttttattattgtcttctgataagtaaacaactgagaaggaaaatacttacgcgttttttatataaaaaataaattttctagaattttttcaaattcttctttttctatagttcctttaatctgataatgtatacccttatattcaaactctgcaatatatcttcttttatctgaattcttaatctcatattgctttactaatatactatgctttccattttgaaactcatattcgtctaataattgatcaaccgttttttctccaaatgatgaatctgttgaattggtatacatataatatttaattacttcttctccgtattgataaaataatacagccatcctttgttctttatctattatatatctttttagcaccatatcttccggcttatactgcattttcaccaaagatgctcccattacttttgtaatttctttatcaacttccaactcatcaatatcttccgtttccatcgtctccatattttcaacatctacataagacaaagtctcatcccctgcctctttattccacaacgtcttccaatacgacttactccccacactggtcatcacacttccgcacaccagaatcagcactgctgccagtgctccgattacaaacttgcttttcttctttttgcggacgacttttttatgcctcttgtcgtattcgtaatcctgaatcttattgaaaagctctttttccatctcatcagacactgtaatgtcatccagagatttgtcctctcggactttcttttcaatctgttcagcttcttttttcatttcattttccaatgataattttttcagttttttcattttctttaccttattctctccagtttgtgtgtcccgtttttcttgacattttttcaaataagggtaatatgatgctataaggctagtgttcttaatttacttcgaacagtagcactctacactaaatctggaggttaatttatgaagcgaattatattgaccggcggcggtactgccggacatgtcactccgaatatagccctgattccaaagcttagagaattaggctatgatattcaatacataggttcttacaatggaattgaaaaggaactgattgaaccttttggaattccatatcatggaatttcttctggaaagctgcgccgttatttcagtctgcagaatttcacagatccattccgtgtaatcaaaggctttggtgaagcccgtaagttaatcaaaggcttaaagcctgatgttattttttctaaaggcggatttgtttcggttccagttgttcttgctggaaagcgatgcaaagttccggtcattattcatgaatctgatatgacacctggcctggcaaataaactggcaattccatctgctgtcaaagtctgctgtaacttcccggagacgttagatgctcttccggagggaaaagcagttcttaccggttctccgattcgtcaggaacttcttactggtgataaggatgctgccagaaagatgtgtggctttacagatgaaaaacctgtcattctcgtaatcggcggaagtcttggtgctgtagctgtcaacgaggcggtacgtgctgcccttcccgaactgctgaaacagttccagatcatccatctctgcggaaaaggaaaggttgatcattctctgaaagaaatcaaaggctactgtcagtttgaatatatcaaaaacgaactgcgtgatctctttgctcttgcagatgttgttatctcacgtgccggtgcgaatgcaatctgtgaactgcttgctcttagaaaaccgaatcttctgattccgctttctgcccgtgcaagtcgtggcgatcagattcttaacgcacattctttcgaacgtcagggattcagtcttgtaatcgaggaagaacagcttacgaatgcaacgcttttggatgcagttcataacctgtacgaaaaccgtgagcagttcataaatgcaatgcacaattctgggcagcaggatccgattgctactattatcggcctcattgaagaagctgccgcaaaataatatagttcatctatcggcaacagtcttcataaaactacagtattcaaaaagataccgggaaactatcagcaccactgtttcttatatacttttctttgtacattgagcagtaaacatttggtgttgctcttagtcttcccggttcatttcttcgtactccgttccgtactttttcttaatccatttctttgctctgtgcagaagactatgaagcacttcgagtcgaatgcccattaattctgctgcttttgcctgaggcatctccatgtaatatacaagaacaatggcatcgtaccatctttcattcttttccatcaaattggtgaaaatcttttcatgaagctctaatctttgtttctgaagatcatcttccagaaattgttcctctgcactgtatacctgtgcttcatatttctcggtatcctcttcactgtcccaattctcatcaatctcgaaaatctcccggctatgctttttcctgtaatttaatgccgcattttttgccgttgtaaacagccatgaagaaatatttttcttcttcatgctgtcatatcccatatacagtttcagaaaagtgtcttgagtaatatcttccgctacactataactgcctgaataagtatatgccgcttttagaatgagatttttatattgttcataaatctcattaaattcgcgattttctgttaacatatcttctccagtactattttaatttttcaagtatctctttcttatcttcttctgtaagttctcccatatgccatccgagacctacattgtcattcttatatcttgggattaagtgcatatggaaatggaataccgtctgtccagctgcctcttcgttgttctgaacgatattataaccatcacatccaagtacatccgtcatctttgtaatcatcttttttgccagacagattgcttttgaagctgttgcctcgtcaatatcatacagattgcggtaatgattcttcggaaggatcagcgcatgtccttttgatgccggtccaagatccagaattactctgaactcctcatcctcatataatgttgctgatggaatctctccatttgctattttacagaaaatacaattatcatctctcatgatctttcctctttccattttattttatctgtagtatagaccatttttcagaaaaagagaatacatttttcagacaccaggtcgaaaaaggtcgaaaatagtcgaatgatttttattgaatgctgttttcggtggtgctacactcttaccgaactcaagaaaatctaactattaggagtaagtattatgttaacaaatatcaatcttgaaaaaatgaaccacctgatggaaacaaacaaagatgcaaaagagattatcacacagcttctgaagaaccatgatgctgctgttgctacaattgcgcatgagatccgcaatcctatgactgttctttattcttctatgcaattaatgagctctctttatgctgaaactgctaaaggttcctgtgtctgggaagaatgcatggatggcgccagacatatgtgtgatttgctggatgatctgacagaactcaacaatggaaaccagttaaaccgtgcttcctttcctcttggacatgttcttcgcaactctgctgttctgttcgccatgtctctcaactttgaaaaatcaaagattgagatgacttccagtattgataagaatataaaaaggttcaatggtgatcgcaccaaattagaggaagtcttcttaaacatacttacaaatgccaaagacgctcttgccgattgtaagtatgccccacgtctgcagtttcgcgcaaagaagcttgacgacaaaattctgattcaatgtcaggataacggctgtggtattcctactgaaattgttgataagctttatgaaccattctttacgaccaaagaaaacggtaccggtcttggtctcgcagtttccaaaagaatcattgaagcacataatggaacgatcgacattacatctgaccataccaatggaacaatcgtatcgatcacacttcctgcgtaaaatatcagatatcgttaatatcagataccgttaggatcttttgattttttcttcgataggttagcaacgctgtcaggaaaccgcaaatcaatccgcctacgtgagccagattatctacacctgtactggtaaatccaaaatagagactcagtacaaccataatcagcatgcctcttcctgacagtgttcccagccttcccctgttcgcaaatacaatccaaagcagccctcccattagaccgaaaattgctcccgatgccccggcagatacaatctgtctgtcatgcatggtattccagtacaaagacagcagattaccacctattccactgataaaataacagagcagaaaccgaattttaccggcctctttttcaaaaatcgatccaagtgcccacaaaagcaccatgttatttaataaatgtgagattccaaaatgcagaaaaagactggtaaacagccgatagtattcctgattttctataatatatggttcatacattgctccatgctgcaacataaaataaccatcctcagtccgtccgatcatagtaagaacaataaacaccagaatattgattcctatcaacgtgatcgtcattatttcttttggtctctctttcattcttcctgactcccttttgacttctatgatatgtttttgaatctgcgtatactataccacatcctatatatcattcatagtcatcagcttccgttatcagatcttcccattctccccattttccagacttaaagcgttttgcaaatttcttgatcggaccatatctcttttcttccatcactgcataattctctctcgccttgttataatagctgttttcctgtacctcaatgttttgattttcttccatttctcttctgtctttttctctcttactttcttctctgatcttctcttctttggacttttcttccctgttttttgcttcttcctcatactgctgcagtatgctttccaggtcataggtttcttttagcgtttctttgtgaagcatgcaggcaagttgaatactctccaaatcctgataatcaactttctttacaaaatactccgtcagctcatgataagacacctgccaggtcttttcgttctctggaaaaaaacagaaaaaatagttttcattcttttcaaaaatatatttttctgaaagcatcagataatttggttctaacatataatctttcattttttccataacactgagaaattgtcttgtcagttttaatatctcttctgctctgatatctttatttttataatacgtttccaacgactgtgaatgtcctgtatgataataatatctacttgcaccttccattccacatccacttactctcaataatccgggaatccgattattcttaagcatccgcatctgataattctcccgatacggttgtacgctgtctattatgatttcagattctgccactctgctctgctgatttgtctttttttcttccatctgattttcttctcccttcactttttcagctttacagaaatctattttttccatctgactttttcttctggtttcaccttcgttgcacgttgtatcagatgaatcttcattcgtccttttgatgcaaaaacttctacctctattttcttccctgatagatcaactctggttgttatattttccagaaaaatcaattttccactcgtcctttctcggaaaaaagcatccagatctgcgtcttctatcttttttctgtccatttcaactcctgtcacagccgtttccgctgccgctgcgtttaaaattgccttatcatgaaagtaaaaaatgatcgtgatgagcagaaaaaatagaattaagcaaaaaggaataaggtaagacatctctaccactgtacttcctttcacgtattttttcgtatatttttcagtaaactccaccaatcatgcctcccagataagcaactgtcagaaatggaataaatggaaatgaattttttcttgtatacttctttcgtgcgatcataattcctccgtaaacagatgcgatcagaaatgcagcaaacagaatccaaagaagattccatccaccagataaaattccaaggatcagaatcaatatgctatctccgtaaccaaatgactcttgtgtgaaccaacttaaaaaaagaaatactcctccacacaatccaccggctaccatcatcctgagttctcctttgctgcatagtgcctgacataaaactgcaatcgcaagcaaaatcaacagacttcttacacttactttcttccaacgaatatctatcacagacaaaatcaacagatacactgctataacagcttgaaaaaacagccatagattttcccttccattttgcccgaatacattcattattttgcacatttagaacatcctcctcttcctgctacttcgcttttatgaactgcacgtattgttctctttagagaactgcaattcaatgagttgtgataccgatttccataattggtaatatatacaccattcattgcctgtccataaacacattgctcacatttatggtattttcctccacctgcatttctcatattttgtaattctaagtattgaacatattgaatagataattgaagatagctgcactgataatctgaatgccatactgttcctttttctgtgatatagacaatctgtccgtcttcatttccctttctatctttttgataaccattccatgcactgactttaaactcatctttcaacttcaccgaaggacttttcattagtggaaccggaatctttatcttgtactcgataacaacatttatctcttctgttcccggaatccaataagacttccagcaactgatagctgatgtaccaccattcagaatacttctctcaattctttcttctccaatcagattcaccaaatctgattttaattgaattgtattcaatacaggaaggacagccgttgactctgctgcctgtttggctgcatcacttcctgctgcatggatacagcctcgtatactctggatttcaattaaaaaaatcaaacttaatactgcaaacataaagaggggaactgcaaatgcagcttctattgttacacttgctcttacccccggtgcagatgccctttctcttgttggactggtattttttacctgtttatttgacatcgcagcttttcctttctaaagtgtgtgggtttcctgcaagagggattgcaggattctgagtgtacgttttggggtgtacaaaagaaggtctgaaagggcatctgcaccgggggtaattctggcttcattcatatccgaaataaaccggatattggtaatttagatttttataaacgattatcttattctgtatttctaatttagtcacacattgatctgcctgaaacaaaatatgtttggaatggagtgcctcttctacacaatctaaagtccgcattgtaatttccggcaccgatttcaaaaagagaaacatcctgatataatcggaatatccgactccttctcctgaatcatttccccttacacttccaccatctgtcagaagaagtggcagctgtgacagagaaacaacccatttatctgcactttttaccagtggaacttttcttccatccaaaagacaacgaagatccataacactttctcctcctgcccacgcaacaagtatcatctgtttcaaagcttctaccgcttcaggcatcagtagtagtgcagatattgtcacagccagcgcttctgcctctgccactcgtcccatatcctttgccagacagccataatttcctgatattctcagaagaaaaagacgaaataacacagattccagattttctttatctgatccttttccttgtagaatatattccagttcgtatgctaaagcatctgaccgatcagactgccattccttttctccactttcatccgttccttctgattgttctgaatcctgccgaaatgcatagccgaatgttttgagaagatattcgttgtacagaagtttctccgttgtctgatcaagtccttttcttgttgggaatgtcccatatccttttttcaaagttctctttgatgcctgccccgacaaatcaacactcttttcagatactttttttcctttcggaatcacaacagaaagaattccttctttttttatcttttgcataatacgaaacggattctcctcatctggcagacttggaccttcttccacgtcttctccttccgtttgactgccggatgcgtcaagactgtcattcacccgttccattgcatctgtcatttcatctgttttcttttccatatcaaattcttctgtctctgtctgttcccatttctctgttgttccggtaaactttttaaccagatccattccatacctttgttccatataagccagcacttgttctcgaaatgcctgtccggattgatctgtcaaatactgaattcccttgatttgatgatctgtagaaccagaattgtaataatgcaaacgctggatcagattttcttcttcataatttcctgtcctgtaaccaagatcaattcccaaaacatgatattgttccataagttcctgatgatattctccgaaaacggaatagattgcccgatctgtgtcaattctgctgagattttttgatccttgaatcacagcagactctagaattccaaagataaatgaaagtaacaaagtaaatgataaacttaaaaatacagtaatttcgccttttacgaaccgcatgctatatgccggagctttctgatgtcactttctcaaaaatcgtagtgatcaaactaatcaactgttctttaaaaatcagcagaagcgcaattaatataaccagaattaaaaccagttcaattgttgtgatcgcggcaacatatttcttatctttattttttcttatcaataattttctcatcttgtatctctccttcttttctctcttttttctcaaatctgaatcgtcaaaaacgctgggacagtcacgatcacgaacacgactgccaacataagaaacaacggtatcatcaactttgttcctgcctcttcaccaagtttctttgccatatttttccgttcctcaaaagcttcctgcgcctctctttgtaacagattcgtcagtcctttggttccttttctcaaattctgacttaaaagcattccgaactttcggtaaaccggactctcgcacctccttccaaatgcctcgtagcattcactttccggtcttccattcttcagttcattcattgtatatctcatctcttcatacactgttctttctccaagatagtgtttctctttgtcatattcttttacaatttggatccaggctcttctcactgtcattcctgcccctatatacagactgaatttattgatcagctgcggataatcaaactgcatctgcctgatttctttctttcgttgttctttctgcttttgtttctctgctgtaaactggaatacaatcatcactccgccaagcaaaagaattccaaatgctctcatttccttcacaggcttccaggataattttcttccatctacctgatctggcaatatcaggtaatccttttcccgctgttcctgatctgctttttctacttcctgggatatctttttcagaacaccttccttctttgacaacggtgtggaaaacaggtgtgcataaaattcacaggacattttttcctcttcatatcgaaggacagcggttaatttgacgagtgttccttcttccgtcagcttctcctgctttaaaacacctctgctgttcataacctcgtagttatcaagttcccatgacacgctgattcccgtatgtggaatttccataataagattcaggtctgacctgacctcatccagacttttgttttcaccaaggatctgagccggaagttcttctgccgccttagaaatctgttctccaatctcttcttttgcatacttcttttccgaaatctgaaccttcatcttctctttccactcgcctgtctccatctggattttttctgtcttttttccttctccctgtccttttctttccaaaatccggtttccattttcatcctgtgctaattgacgatgattatctgtgacatacactgcactaaacattacgattgacaataaaagaacgattccggcctttttataggttccatattttcctttgtcaggctgaagtacttttttccacttcttgttaaatctcaatctgtagaatcctccttccaaacctatatgctccaagataaagcacaagacaaatgctcattacgatacatccggtccatgtaccatacaggacacttaagaattcaccaaatgtcatcttcatgtagagaatcattataaatgggattacgctcatgatttcaaattccagctttttcgcagccagcatggtctgtatctcacgttctgtatcgatcttctctccgattgttctggccgcatctctgataatcgcaattgaatccccaccactgaccttagctgctgcataaactgtaataaaattcgtcacatcctcctgctttacttcagccgcaaattcattcaatacggttacaactgacagattcagatccagcttccttaccatctgaccatattcttttcgaatccttgtattcgcatcatacattccaatcagatcacgatttgtttccctgattgcattctctacagaatatcctgccttaagtgcccctgccattgtctggatactatctctgaactgcctcctgaattcctgttcttttccgattgctttctcttccatccactccttcatgtataagaaccataacgggaacaggagaattgccggaagtatcgattcataaaacaaatacaaaatcagaagaaatctcaccgtacattttatgattccgacagtatattcagttggtgtgatatcctgcagccaggagtttttctttattcgtgatttcatttttcttcataaggcatccctgtatctttccattcttcatcccctcctccttaaattcataaagaacctttgtctggatctttccatcttcataaccttccacttctacaatctgcaaaacctttcttgtcttatctcgaagtcttccaagatgaatgataatatcaagtgccgatgcaacttgtctttgaattgcctgtaacggaagatcaatccccatcagcatcattgtttccagtctgtgtaacatatctgttggattattggcatgtcctgttgacattgaaccactgtgaccattcaacattgctgaagatatcatatctactgtctcttctcctcttacttctcctacaacaattcgatccggtctcatacgaagtgctgacttaatcaaatctctgatggttacagccccttctccttctgcattcggtccgcgtgcttctaagcgcaccagattctgaactccctgaatctgtaactctgcattatcctcgatcgtaatcaggcgttctccttttggtatatagttcgacaacgcattcaggaaagttgtctttcctgctcctgttccaccactgacaaaaatattatattttgctgctaccagctttttcaaaaagttagcggcttcatcagttacgctgcctatatggatcagctgttccatcgtaattgcttccgatggaaactttcggattgtaaggattggtccattcacagcaaccggattcaatacaacatttactcgagatccatccttcagccttgcatccacaatcggagaggcctcatttacataacggttcgattcacctacaatctgttgaatcacatccagtaatctctcctgagacaaaaaacacttcttagaccggaaaattcttccttctttctcataaaaaatatggtcgattccatttaccataatctctgtaatcgaatcatcttcaagaagctcctgcagaacatccagtttacgaaaagagttgaataactcacgcccgattctgatcttatcactcaacgaaatatattcttcatctgctgcctcatccaatactgtgcggattagctcctgcagttcttcatcatccgtctccttcgtaagatcgatttgttccaaaatctgttcatacagctgctcttttctaatcatccttacgacttcctttctctgtccggaaattctgtaattttacttgcagatgcttctaaagcaacaggatttcttggctttcccattctgcgtcttaccgtcttcttaagaatctcgccatatcctgctgatctaagattctcttcatactgattgagttttgcttttgctgcaccttcctcaatgtaaggcgtataaactttactgcatcttcctaacagatcatacagaccgtctaccgtatctccaagatcaagaatgatcactttgtaaatactcttctccagaatcagatccaaaagttgattccattcttcttttgtcacttctctgaaatcttgttctgcccggatcggtgcgatataatccaccccattcatatggctgatcaaagtactgatcttccatactggattgatactttcctgcttcatgtaatacagcagatctccaagattcattccagattcttccggcaggtaataatttaatcctgaatatccttccagattcagatacaacgtaggaatcgattctgaaagaactcgtcccatacgcatggcaaaccttgtcttcccgattcgatgaaccggtgaatagatcccgatcagaccatttacatttgctttcactgtctgcgatctgtctgagacgagttggatttgatgcgtctgtacttctgaattttcctgatctttttcctgaagtaaaagttccagcatgctgctgacactttgataccggaagaatggaatctctgtgggacttctctcgttcggaatcttctcgccgatcagaagatacttctgtcttgccggaatctcatcccggtcttcttttccatactcttctccgatcagcagaatatttacctgcatactcttggctgctattttcagattctcaatatcatgaaatacatgaaactgaaaataaccggataatttctcagataatcttctgaacagattttctgaataactcttttgtgtatcacaaatcacaaaattctcagcagttcctcttactgctctttgctcaattgtcataattcgaaactttgctgcgatcatacagcctgaataaagaaattgtaccgaaggtccaacgcttcgatgcaaaagatacatcagtaattccccaattcactgatgctgcaacagatgattttctgttggtaagtgagattatatacgggcacttctgttttgtccataccaaaattaaaaatataatgtttttgtaaaaaacttacaaaaattgataccatgtaatgctataaagaagacaaaccccaggaattccaagggttccggatgtcaaaaaggtcatcggattcaaaccgacattaattgaagaatctgctggaagaacatatttgtttattataaaaatcaacgccattcctatggttgcacgtataaaaaacttgagaaaaaagtatcctgttttctttttcatttcactcttccaatctgttttacttgatttattttattttttccgtctcttttttattccttttgattccattttcaattctttatactcaaaaaagaaagcggataaagttcaccgtaatcaagtaaactccatccactttctcttgtctttttatttttccgaacagcttacaatcttctgtaaaacataacaactttattcctctgttgtttcctgctcagttgtctcaggaactgatccttcctctgatttttcagactcatcttcatcagaaatctcaacttcttcaccgtcgatctcggcagaagcctttctcaccttcgcaacgctcgctacagtgtcattttccttcaggttgatcagttttacacctgatgtgattctgccgtaaacagagatatcagaacacttcatacggataataattccctctgtgttgatgatcatgatctcactgtcttcatctacagctttcattccgacaacatttcctgtcttctctgtgatcttataacatttcacacctttaccgccacgattctgacgagtaaattcatccatgtctgtacgtttacccataccacgctcagatacaatcagcatatctttgccctggctttcgatctgcataccgatcacaacgtcattatctgtcaggttcataccgcgtacgcctatagaaacacggcctgtagaacgtacatctgtctcattgaaacggatacacataccgtattttgtaacgaggaaaatatcctctgtattatctgtgatcttaacctcgatcagcttatcatcctcacgcagtacgatcgccgcaagtcctgtctttctgacatttgcataatcctgaatcggagtcttcttcacaagacctttctccgttgccatgaacaaatacttaccttcctcatactcacgcagcggaatgatcgcagtaatcttctcttccggcatcagctggagtaagttaatgattgctgttccacgcgcagttcttcctgcctccggaatctcgtaagctttcagtctgtagacacggcctgtgtttgtaaagaacataatgtaatggtgactggttgtaataaacagttcccggatgtaatcatcctccagagtctgcattcccttaatacctttaccaccacgattctggctcttgaatgtgtccatagacattctcttgatatatccaagttttgtcattgtaattacgacattctcgcgcggaatcagatcttccatggagatgtcaaattcatcaaatccaatcttagttcttctgtcatcaccgtatttctcagcaattacaagaatctcttttttaatcacaccaagaagaagttttttatcagcaagaattgctttatactcttcaatcttcttcataagctctgcatattcagcttcaatcttctcacgttccaaacctgtgagtgcacgcagacgcatgtctacgattgcctgtgcctgggcatcactgagtccaaagcgtttgatcaattctgcttttgcttcctgaacattcttagaaccacggatgatgcggatgacttcgtcaatgttatccagagcaatcagtaatccttccaggatatgagctctctcctgtgctttattcaggtcatactgtgttcttcttgtcacaacatcttcctgatgacgcaggtagtactgcaacatctcaagaagattcataaccttcggctgattatcaacgagcgccagcatgatcacaccaaatgtatcctgaagctgtgtatgtttatataactgattcagaattacattcggattcacatcacgacgaagctcaatacagattctcataccttcacggttagactggtcacttaaatcagtgattccatcaatctttttatctcttacaagctcagcgatcttttcgatcagacgtgctttatttaccatatacggaagctcagtaacaataattctgttctttccgttctgcattggctcaatgtttgtcaccgcacgcactctgatcttaccgcgtcctgttctgtatgcctcttcaattcctcttgtaccaaggatctccgcacctgtagggaaatctggtcccttcacgatttcgaggatttcctcaattgtcgtctcttctttatctgcaatctgatcatctatgatctgaacaactgctgaaataacctcacgcagattatgcggcgggatattcgttgccatacctactgcaatacctgatgttccatttaccagaagatttggaaatctggacggaagtacagtaggctccttctctgtttcatcaaagttcgggataaaatctacggtatttttgttaatgtccgctgtcatctccatggagatcctactcagacgtgcctctgtataacgcattgcagcagcgccatcaccgtccactgaaccaaagtttccgtgtccatctacaagaggataacgggtagaccactcctgtgcaagattaacgagagctccataaatcgagctgtctccatgaggatggtattttcccatcgtatcaccgacaatacgcgcacatttacgatgcggtttgtccggtccattatttaattctatcattgagtacagaattcgtctctgtaccggcttaagtccgtctctaacatccggaagagcacgggcagcgattacgctcatggcatagtcgatgtatgaagtctccatcgtctttttcagatcgacttcatggactttgtcaaaaatattgtcttccatcacttgtctccttttttctagggtcagtctatcatattcaaaacctgactgggtttcgcgttcttacgctccacaccagctcaaaaatctgacgattttttcgctgggttggcatttctaatgccaacccagacaactacgtccaggtctgctttcgagtaaactcgaatcagccctgcccgaagttgcctgttgtgtcgctataactactatatatccaagttttgtacatactttgcgttttcttcgatgaattctcttcttggttctactttgtctcccataagggttgtgaaagtaagatcgagctcggaagaggtctcatcatccatcgttacgcgcagaaggattctgtgctccggatccatagttgtctcccaaagctgctctgcatccatctctccaagacctttgtaacgctggatcttattgttgctgtcacgaccaacttctgtaagaatctggttcagttcgtcatcgctgtatgcgtaccataccttcttgttcttctccagcttatacaacggcggctgtgcaagatatacatatccctctttgatcagatccggcatgaaacgatacaggaatgtcaaaagaagtgtactgatgtgcgctccatcgacatcggcatcggtcatgataatgatcttgtgatatctcagcttactgatatcaaaatcttcgtggattcccgttccaaatgctgtgatcattgccttaatctcagcatttccgtaaatcttatcaagacgtgctttctctacgttcagaatcttaccacgaagtggcaggattgcctgagttgcacggtctctggctgtcttcgcagaaccgccggcggaatctccctcgacgatatagatctcacacttggacggatctttgtctgaacagtctgccagttttcccggaagggacattccctcaagagctgactttcttcttgtaagatctcttgcttttctggctgcttcacgggcacgctgtgccataacagacttttcgatgatcatctttgcaacacttggattctgctccaggaagatctccagctgtgttctgacgatattatcaacagctccacgtgcttcactgtttccaagtttctgctttgtctgtccttcaaactgaggatcctcaatcttgacactgacaatcgcagtcagtccctcacggatatcctctcctgaaagctgctcattctctttcagcagcttatttttcttgccataatcgttgaataccttagtcaatgcacttctgaatcccgcaatatgagtaccaccctccggcgttgtaatattatttacaaaaccgtaagtagtctcattgtaggagtcattatgctgcatggcaacctcaactgcaacattatctttcataccttcacagtaaataatctgctcatagagcgcagttttactcttgttcaggtatgttacaaattctttaataccaccttcatagtggaatatatgctcatggatctcttcctcacgaagatctcttaagtgaatcttcaatccctttgtcaggaatgccatctcacggaaacgctgtttcagtgtattataatcaaatactgtttcctcaaagatttccttgtccggaaggaaagtaacctttgttcctctcatctccggctcacattctctgtcaactctgagtttatagcatactttaccacgctcataacgctgtttataaatcttgccttcgttggcaatctctacttccagccactcagaaagagcattaacaacagatgcacctactccgtgcaatcctccggataccttgtaccctccaccgccgaatttacctccggcatgcaggattgtaaatacaacctcaactgcaggaagtcctgccttatggttgattcctacaggaattccacgcccattgtctgtgaccgttatcgaattgtctttgttaatgtctacctgaattttatcacagtatccggccagagcctcatccaccgcattatctacaatctcataaaccaggtgatgaagtcctctgacggaagtgctgccaatgtacatacccggtctttttcttacggcttccaatccttccaaaatctgaatctggtccgctccgtattcagcgtcaaattctgtacctgatgcacccattcttaaacctcctagttttcttttgctacatgtccactttttacatggaatatcttgttgatagaaaatctatgatttacaaactcatccagtcccgtacaagtaatcaccgtctgtatatcatgaatactatccagtaaatagttttgcctgtttttatctaattcagacaaaacatcgtctaataacaggatcggcgtatccccaatgatccgcttcaccagttcaatctcagctaatttcagcgacaacgcagctgttctttgctgtccctgagaaccaaattttctaatatccaaatctcctgacaggaaacacagatcatctctatgaggacctacagacgtacttttcatccgcagatccctctccctgtttttcttcagagcctgctccatcgacatctcaccaatacttgattcataagtcaatgacagccgttctttcccgcctgtcagacggaaatgaatctctgaaataatctcattcacctgtcgtacaaattcttttcttctgtccaaaacctttgttccataagcagccagctgcatatcccagatatccagtgtctccagcaaatgctgctggttcgagccatagatatccttcaaaagtgaattacgctggttaataatacggttatagttcgaaagattgttcagatagatcttatcaagctgggaaagctcaagatcaataaatcttcttcttcctgccggaccctctttgatgatattaagatcctctggagaaaagaaaacaaaatggacaataccgaataactcacttgcacggcgaatcggtaccttatcgattgcaattcccttcggactgtttttcttcaggtgcatatcgatctggaaaatgattccctttttctcaactactgtctccagatgggattcatcatacccaaactgtatcatatcccgatccttcgttcctctgtgagatttcgtcgttccagacaaatacaatgcttccagtatgtttgtctttccttgagcattgtcaccgtacaaaatattggttttcggatcaaaggtcaaatctaataaatcataatttctgtaatttttcagctttaaagacttgattatcataatttccccgccatcacgttataacacgagcgagaaaacctctcacatgttattctacacgttttttaattatttttcaatttttatttcatttccgtcaaaagaagctgtatcgcccggataaagctttcttccgcgtctcgtatcaatttctccgtttacaagaacaagcccgttctgaattacgtccttagcctcaacaccactttcaactaacccggctgccttgagcgcctgaccgagtttaatgaattcatcctgagggcgcagtttgattatttccatttcttatcactccttgattaattttcatcagtatttttgatctttattttttctttaaacttttttaaacatctttaaacttttcattttctgaattttaaaaagtcaaaaaattgcagagcagggcatctgctccgcataatctattattttctggggttagacagctgcattaaaattgactggaagaatcagataaatgtaagactgattctcgtctttgataaagcaaggtgcttttgcattcataaaatacaagtctacttcttcatcttcaatcacacgaagtgcatcgatcaaaaactttgggttaaatccgatcatcagatcttttccatcttttgtacagaaaatcagttcatccatagatccaatctgtgatttgatcttcaactccattgattcattcttgatgtcaatgataatcggctttttgtctccctctttgataagcagagttgcacgatcaatacaatctaacagttcttttttattcacatgtactcttgtctcataatcactggacagcatctggtcaattcggaaatattcaccttcaatcagtctggaaacaaccaatgttctgtcaaattcaaagacaatatgattttttgtaaacgaaatctcgacttcagcatccgcttcaccgccaataatcttgctgatttcctgaagagtttttccaggaacgatcacttttctcggctgataagcatctttcagttcgattttccggatcgaaattctgtgaccatcaagagaaaccactctgagaacatcattgtcaatctcaaaaagttctcctgtcatcatcttgttcgtatcattatcagcaattgaaaaaatagtctggcgaacaacttctttcaaagtaaactcggaaatagtaataaaatcttcacgctcaatcgctggaagataagaaaaatcatctcctgactgggctgcgatattaaatttcgctttttcacaagtaataatcgcctgattgtcagattctgtttcaataacaacatcattgtctggaagtttacggacaatttctgaaaaaatctttgcatttaatgcaataatacctctggaatcaataattccatcaattgtagtttcaattccaagttccatatcattggcagtcagtttgattacatccgttgttgcatcaatcagaatacattcaagaataggcattgttgttttagagggtactgccttggaaacaatactaactccttttacgagattcgattttttgcatatgattctcatgttgatgattactcctttcaggtttcaaggttacagttgatatgtggataacgtttttttctcgcgtaatttatgtatatttatataaatcgattccgtctcctccgccttaggggctgtggataagtggataagtacctgcagccctttaaaatcaagggtttgcgggtttggataactatgtagattacagaaaaataacgtgttaaaactgtggggaaaaaaattcggcaaaaaatccacatttttgttatcccaacgttattcacatagaaatctacaggttttctacaaagttatccacaattaacgcgaaaaaatgacaggttattcacattttatagagttatcttccttatacaggattgatttttttcttaattatattcacagtgttgtttaaagcttcatctgtcttcagatcattctcaatcttgcgtacaccatggctaatggaagcatgatctttaccgccgagcagggcaccaatggattttagtggtgtatcggtcatatttctgcacagatacatgacgatctggcgtggaagaacgatctcagcatttcgttttttaccttttagttcagctaccggtacattaaagtgttcagaaaccacatccatgatcagttctggtgaaactgcacgggtatcatccggtgagatcatatccttcaaggcctcagcagccaaaggaatgtcaatcggtttattctccagattagaaagagcgatcagtttattcaaagatccttcaagctcacggatattggatttaatattattggcaatgtactgcataacttcatccggaatatgatatttctcaagtccgtcgagttcttctttcttacgaaggatcgccattcttgtctcatagtcaggagaggagatgtcagcaatcagaccccactcaaaacgtgtgcgaagtctggcttccagtgtctcaatgtccttcggaggcttatcactggagatgataatctgttttcctgacacatgaaggtgattaaatgtatggaaaaattcttcctgtgtactttcttttcctataataaactgaatatcgtcgatcagaagaacgtcattattgcgatatttctcgcggaatgtggtcattgccagttcatttccgttcttacctactttaagagcatcgatcagttcattcgtaaaagtttcacttgtgacatacagtacttttttggagggatcatgttccaaaatgtaatgtgccacggagtgcatcaaatgggtctttccaagtccaacacctccatataagaagagagggttgtaaatctctcccggagattcggcaactgcgagggaagcagcgtgagcgaaattgttgttgcttccaacgacaaatgtgtcgaaagtgtactttggatttaagtttgccttttcataaatcgcatttacacgggtcttctggacggaagactctttcttttccttaatcactttcgggctgtcggttacaaattccacttcatattctgtaccggttacttcggcgatgcagaccttaaaaggaagcagatatttatcttgaatatgttcaagactcgccttcagtttgacgagaatatatacggtattgtccttgacttcataaacagtaagtggtgcaatccatgtagtataagaaatattggatgagcaatattccagcttcatcttgtttagtacctgatcccagttttgttctacaatgttcatcgatagtaactcctaattttttaaaattataatggaaaggttgaaaatccagcgtaaataattcaggacttatccacattcaactcctgattatggcttttagggcagacttccccctacccaaatacaatgttttcagcaactgtttgttaaaaaagtgaaaaacagccactttttattaacttcgtactaaaataatgtggataactctaaaaatggtagagtctctccattacattctacatcaaaaaagctgtagaatcaatgagaaaacagtgtgtataactttatcaacatcttaaaacgttgataaatatgggtttttatgaataaaaaaatttttatcaacacgatatttagtggttttccacaggttatacagaagttatccacatatgttgataactttgtggataacttctgtataactattgtataattatgtgaaaaaatagttatatcccttgatatataaggggttcgaggaactgtgaaattattcacagaaaatgtgaaaaactctttaaaatgaaaaaaggccagaaattgagggaaagattgttgataaagcttgactttatgcggttttccctctataattaagagcagtgtcttttaatattgaggcgcagtaacgaagttaattttgtgaatacttttattataaggtatatcaggcataagggaggtgtaagaatatgaagatgacatttcagccgaagaagagatcaagatctaaagttcacggattcagagcaagaatgagcacaccaggcggaagaaaagttctggcagcaagaagagcaaaaggaagaaaacagttatcagcataggccgcatatatgtggccttttcttctatttaatattaaatgataacaggatttttgttatctggaatgaagaggatattgatgaaattttctgagtctttaaaaaagaataaagattttcagtcagtctacaggaatggaaaatctttcgctaataaatgtcttgtaatgtatataatcccgaacgaactgaataggaaccgactgggaatatcagttagtaagaaggttggaaacagtgtggtaagacatcatcttacccgattgatcagagaaagttacagattatcagaagaacatttccgatgtgggtatgatatagtagtaatcgcgagaacaagtgcaaaggataagaattatcatgatgtggaaagtgcactgatccatctcggaaagcttcatcacatatatgtctgataagacaatgataaggaagtggcgcagatgaagtatgtcttgttatggatgattcgtttttacaggaaatatctgtccggaatgaagggcggatgcacttgtaagtattatccaacctgctcacagtatgggttggaagcaatcgagaagtacggagcactcaagggaggggctctggcggtatggagaatcctgcgctgtaatccattttcaaaaggtggatatgatccggtaccttaaggaggataagtaatggaagtatacggacttttggcttcaggttatggagactggccgattatcaaacagattgcctggcttttaggtcaggtaatgaatggtatcttcaatgtacttagtaagattggtattgagaatattggtgtttgtatcattattttcacaatcattatttatacattgatgattccgcttacaatcaagcagcagaagttttctaagatgtcagctgttatgcagccggagatcaagaaaattcagaaaaaatacgaaggaaagaaagatcaggcttcaatgatgaagcagcaggaagagatcaatcttgtttatgagaagtatggaacttccatgacaggtggatgtctcccgatgttgatccagatgccgattctgttcgcgctgtatccggttatccgtgatattccaacgtatgtaaaaggtgttaaagatgtttatatgcctgtgacagaagcaatcatgaatacaaatggcttccagaagatcatggagacgatcggtgaagcaagcccggttcttatgaacccgaaggcttatgattattctcaggcagatacaattgtaaatgtactttataaattccaggattctacatggaatgcgctgatggaaaagatgccgagtatcacggatcttgcacagcagacaatggataaggttactcatctgaacagtttccttggaattaatatcggagaacagccgctgacacagttgacagctgcattccacaacggatccgttgtagggatcatccttgcagtacttattccggtacttgcaggtctgacacagtttatcagtgttaagcttcagccacagccggcaggagatgacaaagataacccgatggcaagctctatgaagacaatgacatacacaatgccgctgatctcagtatttatgggattcacacttccggcaggtcttggtctctactgggcagcaagtgcagcagtaagatgtattcagcagcttgcaatcaacaaatatctcagcacaaagtctcttgatgagatgatcaaagagaaccaggagaaagcacagaagaaacgtgagaaacacggagctcctgcaaaagagatcaataagatggcaacaacaagtactcgtaatgtgggtactgttacaaaaggaaaatctggaatttctgaagcagagagagaagaaaagatccagaaagcacagcagaaggctcagaattccaagccgggaagccttgcttctaaggcaaatctggtaagccgttataacagcggacagcagacaaaccagccgaaggcagaagatgagagcagctccaaaggaaaaaagggcaagaaaaaataaaggaagattcgtaactcctaaccgttctcttaaaaagcaggagacgggtcaggatttgaagatggaggaatcgggatgaacggtagtatcagagtatcggcgaaaacagttgatgatgcgatcacagaagcattgatccagcttggtgtaacaagcgacagactggagtacgaagtaatcgagaagggaagcgcaggattcctgggaatcggaatgaagcaggcagttattgaagcaagaagaaaaccggaaccgaaagaggagaaggtagaagagcctgtagtagaagaacctgtgagagtagagccaaagaaggttgaagcagttcagcctcagaaagcagctgcagaaaagaaagcggatgaacctcagaaggctgcttttgaaaaagctgtagaaaaagaagcaaaagaggaagttaagaaagagacaaaacttgtagaagttcagcctcagacaatcaaagcagtagaagatttcctcaagaatacaatgaaagccatggacatggaagttgagcttaagactgagatcgatcaggatggtgcactttgcgtagatatgagtggagagcatatgggaattctgattggtaagagaggacagactctggattctctgcagtatcttgcgaaccgtgtagcgaacaagcatcaggaaggttatgtaagagtaaagcttgacacagagaactatcgtgcaagaagagaagagactctgagacaccttgcaaagaacattgcacataaggtaaagagaaacagaagaccggtagcacttgagccgatgaatccttacgaaagaagaatcatccactcagcactgcagtcagatccttatgtgatgacacacagtgagggagaagagccgttcagaaaagttgttattactttgaagaaataatactgtttatgaatcggaagcgaaaggacgtttacgcttcacggatactttcgtgaggtgtggaacgtccttttttctatgtaaagtatagaaaaaaggaaatactgtaaagaaaaaacagttggaagcaggaagtgtgccaagcacagagcaggaaaacagaaaggaaataaggcatgaatcaggatacgattgcagcgatttctacaggtatgactaattcgggaatcggaattgtaagaatcagcggaagtgaagcgctggagatagcaggtcgtgtatataaagggaaagaaacgattacagaagtgccaacgcatacgattcattatggacatgtaatggatggagatgagacagttgacgaagtacttgtgatggtgatgcgcggacctcgcacatttacaggagaagacacagttgagatcaactgccacggtggaacttatgttgtaagcagagttttggagacggtcttaaaggcgggagcaagaccggcagagccgggagaatttaccaagagggcattcttaaacggcaagatggatctgtcacaggcagaggcggtcattgatgtgattacatcagaaaatgagtatgcattgcagagttcgatcagccagctcaagggaagtgtgaagaacaggatcaaagagatccgtgagaagatcatttatcatacagcgtttattgagactgcgctggatgacccggagcatatcagtgtcgatggatacggtgaggtgctaaaggaggcagcagaagaggtgatcgggcagttgaaagaactgattgattcctcggatgatggaaggatcatgaaagagggaatccagacagtaattcttggaaaaccgaatgcaggaaagtcttcacttctgaacattctggctggtcatgaccgtgcgatcgttacagatattgaaggaacgacaagagatgttctggaggaacagatccgtctgcagggactgactttgaatatcatagatactgccggaatccgtcagacagacgatatcgtggaaaaaatgggtgtcgataaggcgaaagaatatgcaaaagaggcagatcttattatttatgttgtagatgcatcaagaaatcttgacgaaaatgatgaaaaaatctttgatttgatttatgataaaagaacagtgattctgcttaataagtcggatttggataccgtagtgacagaagagatgatccgcgaaaggatttcacaaaaaggtgttcagaagcagattcctgtgattgcgatttctgcgaaggaagagcagggaatcaaggaacttgagaacaccgtgaaagcaatgttcttaaagggagatctctcattcaatgaagaggtttatattacaaatgcaagacagaaaaatgcattggtcaatgcgagagagagtatgaagaaagtcattttcagcattgatgccggcatgccggaggatttctattcgatcgatctgatggatgcctatgaatcacttggaaatattaccggagaatcaataggagaagatttagtaaatgaaatattcagcaagttctgtatgggaaaataaagatgaatatgatgttgtcgttgtaggcgcaggccatgcgggttgtgaggctgcacttgcgactgcaagacttggatttaagacagtgatctttacggtcagtgtggacagtatagcgctgatgccttgtaatccgaacatcggaggaagctcaaagggacatctggtcagagagctggatgcgcttggcggagagatgggaaaagtaattgataaaacatttatccagtcgaagatgcttaacagttcaaaaggtcctgccgtgcattcactgcgtgcacaggcggataaagcaaattatagtaaaacaatgcgtcaggtgcttcagaaccaggagaatctggatatccgtcagatggaagtgacagagatcctggcagaggatgggaaaatcacaggagtacagacgtactcaggcgctatttaccgctgtaaggccgttgtactctgtacgggtacatatttaaaggcacgctgtatttacggcgaaataagcacgcatacgggccctaacgggcttcagagtgccaactacctgacagatagtctgaaagcactcggaattaagatgtatcgcttcaaaacaggtacaccggcgcgtattgataagaatacgattgatttcagcaagatgcaggagcagaaaggagatgagagggttgtaccgttctcatttactacagatcctgagagtgttcagatcgatcaggcgtcctgctggctgacatacacgaatgagacaacacatgagatcatacgtggcaatctggatcgttcaccgctttattcaggagcaattgaaggaacaggcccgagatattgtccgtcgatcgaagataaggttgtgaaattcccggacaagaaccgtcatcaggtatttatcgagccggaaggacttgagacgaatgaaatgtatgtcggcggaatgtccagttcacttccggaagatgtccagtatgcaatgtacagaagtgtgccaggactggaacatgcgaagatcgtgcgaaatgcgtatgcgatcgagtatgactgcattgatgcgagacagttgaagagtacattggaattcaaagagattgaaggtctgttcagtggtggacagtttaacggaagttcaggttatgaagaggctgcttcccagggactgatcgcaggaatcaatgcggcgagaaagctgcagggaaaagaaggtatcgtgatcgacagatctcagggatatattggagttttgatcgatgatcttgttacaaaagagagtcatgaaccatatcgtatgatgacttcgcgcgcagagtacagactgcttcttcgtcaggataatgcagatatgcgtcttacaaagattggttacgaggtaggactgatcgatgaggagagatatcagaaactgctgaaaaaggaagagatgatcgagaaagagatcgagcgtgtggagcacacaaatgtaggtactacagaagctgtacaggcattgcttgaatcttatgaaagtacaccgctgacatcaggaacaacacttgcagagctgatccgcagaccggagttgtcttatgagaagatcgcaccgatcgataagcacagaaaagaactgccatatgatgtgaaagaacaggttgatattaatatcaaatatgatggttatatcaagcgtcagatgcgtcaggtagagcagtttaaaaagcttgagaacaagagaattccagaaaatattaattatgatgagattcagagccttcgtcttgaggcaaagcagaaactgaatcagatccgtccgtcgtcaatcggccaggcatccagaatctcaggagtttcaccggcagatgtgtccgtgcttcttgtgtatttgagcagtaaataaagtgttagttaaagcaatacatgagaatctaaaaatgctaaatattctacggaatggtattgtcggattgttgaaactgttccgtgggaagaaatgattggagaatatagtgggagagaacacacagagtaaatttgatctagaattagaaaaaatcggaatcacattaaatgagcgacagaagcagcagtttgacaagtattatgagatgctggttgagtggaataaagtgatgaatctgacagggatcacggagtatgatgaggtgaatctgaagcactttacagatagtctgacaatcgcaagaacacaggagatgcagaaggtgcagagtgtgatcgatatcggaacaggagctggtttcccggggattcctctgaagattgcatttccgcatctgaaggttgtacttcttgattcattgaataaacgaattaagttcttagatgcagtaattgaagaattaggattggaaaatatcagtacaattcatggaagagcagaagattttgcaaagaaaaaggaatacagggagcagtttgatctctgcgtttcaagagctgttgcgaatctgtcaacattgagtgagtattgccttccgtttgtagctgtaaatggcagttttgtttcttataaaagtggagattctgaagaagaaatccagcaggcaaaacatgcgatttcactgttaggtggaaaagtaaggaatgtggataagttccaattacctggaaccgacatgggtcgtgcacttgttgaaattaaaaaaacaaagcagacaccgggaaaatatcctagaaaagcaggattaccggcaaaagaaccattaaaataagcaaatataggaagacctgtttactggcattctggtgaacaggtcttcctttttgagtgtattgttgaaaaatgccgaaatagtcagaaaataagtttaaaaagaagatatactcaaaaaaagaagaagttatccacattttccacatgagatattcactctgtgtggatatctcatgtggaaaatgtggataactctaatttttagaaaaaatatgatacgagtaaaatttctaatttatgcgatattctattcacattcttcagcgtctgacaagaaaatttctacattttcaatgaattcgtcacatttttcaatatgaggaagttgtttggttttggccattcctgcaatttcaatcgaaggaagatagttctgatattcactggctgccaaagaattttcaggattactatttcctacaataatggagatgctgttatttaatttattcagacagtgaagaacatttgcattcgtatatctcgtcttttgacaggcgaaaagatatttggaatttgtatgttctttgtgtgctgcttcaaagtaggtgagaatatctttttcactaatttcattctgagtataataagaagagcagagggcatgagcaattgtcttcttatttacatacatattatagataaatgtacccagaataggagaatacaggatattctttatgaatttactacgttttgtaggaatctttgccaggtctaccagattcggcggatttatcataataactttatttataattgtttcatcgtttgcacaggccattagtacaaatggacaggattcaccagaaacaattacatcagttttttctccgataatatgtttgataaagttcgtgattaattctacatacagataattagtatatgttaatcccggacgatcggaacaaccgcagcctaaaagatcaattgtatatacagtatgggacttggcaagttccgctatattgtttctccattcataggaagaagaacatacattgagattatgcactaaaagtaaaggtgatccttcaccagttttcttatatgcgattttgccaaatctccagttatagtattcatattcatcagaattgattaatttatcagcagttgagatatattctaatacacggttggcaatatgcattgcaccgagagaaactcctgctaaagtagtaaaaaaagttagttttttcttaatactcaaattattcaccttccttattataatagtggtttgttttatataaaagtaagagtctgaattaaaagaaacccttactttattatactacattcttaaattcaaataaagcgaaaaaatcttaatgtttaattatagaagaagtggattatctctaaaaatgtttcacgtgaaacatttttgatccgcacaatcgaatccgcaccctgcgcgtataatacagttatttacaaaatgcagtactagaaataactgagaaaacacaatgtttcacgtgaaacattttagaaaataagaaggaagatgtttcgttactgttcactcccgtgtcaatcacttcgctgattgacacggaggatgcatgttttggcttgaatgcatctcgccctatcgccaaaggcgatttaaaatggcgagatgcgttgctggtcgcacattgtgtgaacagtaacgatgtttcacgtgaaacgtttgattagttctagattaatgaaaagaaaggtgatataataatgaatgtccgagagaaaggagtaaaaataatgggtagagtgatagcaattgcgaatcagaaaggcggagttggtaagactacaacagcaatcaacttatcagcctctttagctagttcgggaaaaaaagtgcttgctatagatatggatcctcaggggaatatgtccagtggattgggcgttgataagaatgaggtcgaaaagacaatttatgaacttattattggtaagtgtaaaattgaggagtgtatttgcaaggaaccaatagaaaatctgagcgtagatgtgcttccgtcaagtattgatttatcagccgctgagattgaactgattggcgttgacaataaggaatatattttacgagatgaagttgaaaagataaaagataattatgactttataattattgactgccctccggcattgagtatgcttacaattaatgcaatgactacttctgactcggtgattgttccaattcagtgtgagtattatgcactggaaggattaagtcaattgatgcatacgattgaacttgttcaggatagactgaatccgaaacttgaaatggaaggtgtcgtatttacaatgtacgatgcaagaacaaatttatcattacaggtagtggaaaatgtaaaggataatctgaaccaaaatatttataagacaattattccgagaaatgtccgactggctgaagcaccaagttatggacttccaatcaatctgtatgatccaaaatccaaaggaacagagagttacatgcttttagcagaagaagtgattaataaaggagaataagtatgcctgtgaagaagagcggacttggaaaaggattggatagtctaatcccaaacaaaaacgttaaaagcgcaaaaccttctgtaaaagcggacgagaaaaaggcagctccgaaagaagaaattctagaggcaggaccgatcatggtgaagataaataaagttgaaccaaatcgggagcagccgcgaaaagattttgatgaagatgcattgatggaacttgcagattcaattaaacagtttggtgtattacagccgattcttgttcagaagaagaaggactattatgaaattattgccggtgagagaagatggcgcgcggcaaagctggcaggattgaaagaagtgccaattatcgtaaaagaatttacagagcaggaaattgttgagatttctttgattgagaatattcagagagaaaatctgaatccgattgaagaagcaatggcttataagagactgttgaaagaattcaacttgaaacaggatgaagttgctgaacgagtgtcaaagagcagaactgcggttacgaactcaatgagattattaaaactgaatgacagagttcagcagatgatcattgacgatatgatcagtacaggccatgcaagagctcttctggcaatcgaggatgaagagcagcagtacatgcttgccaacaaaatctttgatgagaagcttagtgttcgcgagacagagaaactggtgaaggctctgaagaatccgaaaaaggaagaaaaaaagccggaagtagaaaatcagttcgtatacacaaatcttgaagagcagatgaaaagtctgatcggtacaaaagtaagtgttcacgcgaaagcaaatggaaaaggaaagattgagattgagtattactcaccggatgatctggaaagaatctatgagttgctcatgacaatccagcataattaaaaaggagatggtagaagtgactggagtatttggcaatctgggaattgatccattctacgcatttcttattttacttattttgcaggtagccttgcttgtcgtactggtgttagtgtatgataagtataaacacctggaaaaagtatttaatacctttatgaagggaaagaatgggaaatcactggaggaatccatttttgaacggtttgacaagatcgacgaagtcgtagatcaggtggaagaaaaccgtgaggagattgcagaactttataataaaatgaaaacgcattaccagaaagtcggaatcgtaaaatatgatgcattccatgaaatgggaggcgaattaagttttgcaattacaatgttagatgaaaacaatactggatggatcttaaatataatgcatagccgtcagggctgttatgcatatgtgaaagatattgtaaaaggtgagagtacaattcagctggcagaggaagaaagagaaagtcttgagaaagctatttttcaagaaaaataaatagtaaaaaagaaattagacaggaaagggtaaataacatgttagacatcaaatttgtaagaaataatccggatgtagtaaaacagaacatcaaaaataaatttcaggatgagaagcttccacttgttgatgaagtaattgaactggataagagaaacagagaaatcaaacaggaagtagaagtacttcgcgcagagaagaacaaagcttctaaggaaatcggagcaatgatggctcagaagaagattgaagaagcagaagcactgaagaagaaagttgcagagagtaatggacgtatcaatgaactttcagaggaagagaaagaagtagaagagaaactgaaaaagaatatgatgatcatcccgaacatcattgatccttccgtaccgatcggtaaagatgacagtgagaacgtagaggtagaaagatttggcgagccggttgttccggatttcgaagttccatatcacacagacattatggaatctttcaatggaatcgatctcgatgctgcaagaagagtagcaggtaatggattttattatctgatgggagatatcgcaagacttcactcagcagttatctcttatgcaagagatttcatgatcaacagaggattcacatactgtgtaccacctttcatgatcagaagcaacgttgtaacaggtgttatgagctttgctgagatggatgccatgatgtacaagattgaaggagaagacctttatctgatcggaacaagtgagcattccatgattggtaaattcattggacagacattggagaaagatcaggttccacagactctgacaagttattcaccttgtttcagaaaagaaaaaggtgctcacggaattgaggagcgtggagtttacagaatccatcagttcgagaaacaggaaatgatcgttgtctgcgaaccggaagaaagcaaagaatggtatgacaaactgtggaagaatacagtagaccttttccgttctatggatattccggtacgtacacttgagtgctgctccggagatcttgcagatctgaaagtaaaatctgttgacgtagaggcatggtcaccaagacagcagaaatacttcgaggtaggaagctgctctaacttaggagatgcccaggcaagaagacttggtatccgtatcaaaggagagaacggaagctacttcgctcatacattaaacaacacagttgttgctccaccgagaatgctgatcgcgttccttgagaacaatcttcaggcagatggttctgtaagaatcccggaagttcttcagccatacatgggtggaaacaaagaaattacaccaaagaacaaataaagaaatataaagcaaataaaatatgcatcagtatttaaaagcgattggatttgaaaatattcaaacaagaaaagatctgaaaaagctcttaaaagaagtagaagagaatttcacacatcagacaattgtatcctacagaccgggcgaagatttctgcgaattccagaaagagttcggtcaggatgtagggatcacactctgcggagaacttgatgatgaggaacattttgaagctgcatattatttcccatactttgagggaagcggagttacaacgtatgcagaaatcgatgtgcagagaaagattgagaaagaacagtatgttggtctttgtgaagattccaagatcggaatcagtctgatcttcacactgcagaatggtgtggaatatatgcgggagaaacaggctggtcttgcaaaagatgtgcagacctcagtgacattttcaggattggcacaaggtggaatgatcctgcttccggttaataaaaatgagcagcagattttaaatgaaaagcgtgcgtcagatacaagaagagaattgatgaacgcagcccgcaagggcgaccaggcagcaatcgagacgctgacatttgacgatatggatctctattccaaggtgtcaaagagattggcgaatgaggatgtattttccattgtagatacgtatttcatgccgtttggagcagaatgtgatatgtattcgatcatgggagaaatcctggcggtaagagagcggatcaacagaatgacaggtgtgagattgtatcagatgcgcctgaatgtaaatgaactgacatttgatgtctgtgttccggcagattccgtgatgggagagccggaaatcggaagaaggttcaaaggcacgatctggctgcagggatatattaatttttaaacatgaagagaaattgttgccgggtgcacgtagtgtgaaaagcaactggaaatccacatccggaatgtgaaaaacattaaataaatgtggaaaaaagatttcatttaacagaagaatgtggataacaaaggcaccatctctggctgaaaagtaattcggtcaggagatggtgtcttttacaattcgtgccattttagcatgattcgtgccaaaagaattgaaaataagagatgtttttttataataaaaacataactgttcagagccaaccttcaaaatgctacgcatttcgtcggtgtggcgtatccgccaaataaaatttcaaaaacagtcttaaaaatgcaagcattttacacttgttttatgaaattctgcttggctctgaacagttacagattacgagaaaaaggaggccgaataatatgaaaaaacgaacaattcttttagcatttattatatcatcagtcgcaatgacatcaggttgttcatcgaatgaaccaaagacagatgaggtgaaacaggaacagacaaaaacagaaagtgtaagctcaggagtaacgataaaaccgcttacccaaaaggcaatcgatgagaatccttatatggcaaaaaatgatgcgaatatccaccatgattgttataattcagattcaacagatgaggtactgcctgttggtatttacccagaaattaatgtttcttatgaaaaggtgaatccgaatgcgtctccggcggtattttttgacaattatggacattcagttgttccgttgctgggaggacttgcaattcgtgatatcaatgcagaagaaacacagacgatcggatatttctcgccaaaacagcatgacggtggagggtatgtgatacaaagttcctattcctttgttgatgaaaataatcgtctggtgtgtccgacaagcaacaatcatgtacttatgttgaaagcaacagacgaggaaggaaatgtgctgccggaatttgaaaaagtgctggatattgatattaaagcagcggcagaggcgattaccggaaagacattggatcagaatttattatccgtagtgtttgactatgaggggaatctctggtttgcaaccggcggattcagaatctatccggaacgtcagcagcaaggtgcgatgggatacatttccagagatgcgatcaacgcaattctgaatggagaagaggttgatctgacagcggctacatttgtatatgaattaactcctggagaaggggcagaaaatggaatagcttcttcgaaagagggtgcggtcatcttaacaaatcagaactgctatctgctgaaagcagataacggtgtacaggtagaatggtgtactccgtatgaaagtgcaggggcaaaagacagcaaagaaggtgatgaaacgaccggagggggtctggcgtggggaagcggatgttcgccgtcactaaccagtaatctggtcatgtttacagataatcagaatccggtgaatctactggcattagatatgaagaccggtgaaaaggttgcaagcacacctgttattgatgagctgccggaagaaatgcaggtatccgtagaaaattcagcaatcgtatatgataacagtgaaggtacagtcagcacaatcgtatgtaactggtttggagcaggaagtgcgaagcttgcggacgcagataacgattcatctgtacagacatatgaaaatatctatgatgtaaactggctgcagaaaggaaataaaatggtcatgccgggagttgagcgtgttgatacgatcaagacagatgacggatatgaaatgaagagtatctggtgcagagatgatatccgggatacatcgatgatgaagctttcaaccgcaacaggatacatttacggttatgttcaggacttggacagtggcatgtggcagtttattatgatagattttgagaccggtgagactgcattttcaatggacgtgtcagacaaaccaggatataacaatatggcaatcggtatgtatgcaggaagcagtggaaatgcattatactgtccaaccggatatcttgaactcctcagactgcaggatcggttcgtatatcttccggaaatgccttaccgaaaagtagatttggacaaggcaatgcgaaatatattaacgcaggaagaatttacggaagacggaggtaagggcaatgtcgcaggatggctgaatacgataacggtagaaaatgtacatccgagtacgactgtggcgatacgaatgaaggggcttgcaggcaaaacggatgactttaagctgtatgcttatggaaaagacggtaagctgacagaggttccggaagatctgtggaagattcagacagaagatggaacgattccagagaaactgtcggaagataccttatatgaagtacatgttacagtagaggatggaggaacattcgatcttagtgagacagagaaagagatcaagatagcagtagtattaggatagtacacagatattgaaagagacgattgccaggtatcaatagacatagcataatgagtgaaaaggaaaaactcctgtgattttgtagattcaaatcacaggagttttctttctatctattcagttacttccaggcaagtttctttcgtatcagttccgccacggcggatcccggcgaataaagagcctgatatattatgccatacactgaagatcgctcccggaagcgttgccagtggattggctgcaaaattagctgttgcaagagaaatcgcaagaccgctgttctgcattccgacttcgatcgcaatcgcagtagctttatcatattcgatatgtaaaagttttgctgcaccaagcccgatgcccattccgcagagattgtgaagtgctacaactccaagtacgagcagaccacagcttaagattttttctgcattgacagatacgattccactgatgatcattacgatggatacaacagaaatcagtggaagtacttctgatattttctgaatctgctttccaaagatccagttgatcaaaataccaagaagcaccggaatcagtacaactttcacaacagaaattaccattgcaaggaaagatacttctacccaggcaccggcaagcagatacactaataatggtgtcatcagtggggccgcaagcgtggaagtgattgtcattccaacagagagtgccacatcacctccggcaatatatgtgatcacattacttgctgttcccccaggacaacatccgaccagaataacgccgagtgcaagatctgtcggaagatgcatcagctggcataatccccatgccacaacaggcatgatcgtatattgtgcaacaaatccgatcacgatttcttttggtcttgaaaaaactctcttaaaatcgtccatcttgattgtaagccccatgccaaacatggcaacacctaaaaagatggatgtataattggttgtccacgcgaatccatcgcgccaaaaaaatgcgatcacagagaagcagatgataataattccaatatattttgtaagaaaagaactggcttttcctacttttttcatcacattttccatatgctatacctcgtagctaaagttgtcgatcagtctggtttttccgatgtaaactgccatagcgaccagaacatctttttctacgacttctaccggttgcatattcagtgcatctaccatagatacataatcaatctttgccagaggttcagcttcaatgatctcgcgcatctttgttaatacttcttcagccttgattcccttgcagattatatcctgaccggcttttacagctcttgaaagacaaagtgcggcttttctttcttcttcacttaaatatgtatttctggatgatttcgcaagtccgtcttcttcacggatgatagggcatcctacgatctggatatcaaaattcagatcctgtaccattttgcggatgattgccagctgttgtgcatctttctgaccgaaatatgccctgtccggtgttacaatgttaaataacttagaaacaacggtgcatacacctttaaaatgaattggtcttgtcttaccgcacagtgtatctgataaagtatcaatacttacaaaggcatgtggatcatggtacatatcctccggttccggatgaaagatgacatcagctccaaggctctcgcagagttcgctgtcacgtttgaaatctcttggatatgcttccagatcttctgtcggtccaaactgtgtcgggtttacaaaatcagatacaacaacgatatcattttcttcgcgacatctcttgatcagacttgcgtgtccttcgtgcaggaatcccattgtcggtacaagaccgattgtttttccttctcttttccagtttttaattaaatctcttgtttcctttactgtttttgttacctgcatggtgttctccttttaaaactaaattaggagatagcctcttgttctgaattcaacaaatttcattttcatttataggttacaatcacttttgcagttatgccatatctttcagcaatccgtgtttctcatagtttgtaacacggctgatcttattctcatcatctacaaaaacaacctgtggtttatgttctttggcttcttcagaatcataatgtgcataacacatgataataattttgtcaccagtacttacgcatcttgccgcagcaccatttaagcagatcattccgcttccgcgcttgccgcagatcgtataagtttcaaatcggcttccgttatttacgtccacgatctgaactttctcatattccataattcctgccgcttccagcaggtcttcatcaacagtaatacttccaacatagtcaagttcggcctgtactactgtagcacgatgaatctttccttttaacatctcaactgtcatttcttattggtctccttacaaaaaaagcattcgtcaaggcatactggtccctgcaaatgcttttgctattcttcgtattccctgagtcttattttatgtcttaaataaatataagctcgctttccgccatttccggcggggtaactgttcaatatgaaattgttgtgattcagtcagagtatagttttgtagtattccaaatactatctccgcaagtattatgacaccctgtgaaaggaatgtcaatatggttgcgcaatatgcgttgttggtcgcacaacgtgtgaatattatgggctgcttctccatgaaaggacgattggatgattataaatgggccggtccgtatatggtcagtaaccaggtggttgcagtcaatgagaacagtgatatctataccctgagtgatctggaaggaaagacacttgccgtacaatctacaacaaaaccggaaggaatttttctgaaaagaacagacagcaggattccaaagcttggtaatctgattagcctggaacacagggaactgatctatacattccttggaaagggatatgcagatgcaataggtgcacatgaggaatcggttatacagtatatgaaagattatgatgcgaaattccgaattctggatgaaccacttatgacagtcggaatcggagtcgctttctcaaaaaatgaaactcgggatctgccggagaaactggagcagactctggatgaaatgagagaggacggaacttctgcaaaaatcataggaaaatatcttgatgacccagaaaaatatctggaggtggaccagcttgaagaagaataaaaaatctgtcccaacagaaaaaaaattctggatcatcagtatagctgttgggatatgtcttgtcgtgctgtctgtatgttttttcagcaatgcagacaaagaaaagaaagaggctaatcttttagacacggtaaattatgtaaaagtacaatgttccacatatacacattataatgaatcatcagaatccaaaagtctgcttcgtgccattgagggaacccggcaggtcagcaaaaatatagccgcagaaacagagaatgaaaaaacactggatgatcagctattgaaagaaagtgcagagcagttatggctgacgggaatcgtggttctggatacagatggaactatagtatgtgaatacagtacgaacgaaagtttattgccggaaataaaagaatgtgcagagaaagaaatcgtactggatacagcaatttacgatgaaaaagtgtatgctaagagaatcaatcataatgacggggcttatattgatatggctgcctgcacaagaaaggatgcaccgggagttgtagtgacttattattatacttctgcagagtatgcaacgaattatacgcttacgatacagagtttgttgaatggctatcggaaggaccgggatgggacaattatcgtagcagatgaaggcgtgatcattgcttcaaacaataccgggctgattggacaaagcacaatcgattatgaagtaatccaaaagctaaaaaatcatgcagacagtaggcacatgatgggcttaacgatcaatggagttcggtgtcacggtgttatgctgaagcagagagaccattacatctatgcttacgttccggattcgatcatatttcagacacttctgcaaaatgtgatcatgtgcctgttcatttatctgattgttgtagcactaatctggatgatttacagaaaatcacagaaaaacattctcataatagaaaaggaaaaagaacagaagtatcaaaaaagccttctggaagcagcgaaaaaggctgatgaaagagaaatcaaggtggaacataaaacaccagagatcattcataaagatcttataggcagcccaatccatctgaagcgtcttctgatgaatatcttgagtaatgccgtaaagtataataaagattatgggaagatttatttgagtgccagagagattccttccgatcaggatggaattgtgacttttgagttcacatgtcaggatacaggaattggtatgagtgaggaattccaaaaacatctgtttgagctatttgcgcaggagcagaaaggcggagcatctaagtttggcggtaccggtctgggaatgccgatcgatatgaaactattagtggagattattgctgaattagcaggaaaaaataaaaatcgtgaggataaaggatgagcgagaaacaaaaactacttattgtagatgattcagaacttaacagagatatattaaaggagatccttggcagcagttatgattatctggaagctgaaaatggaactcaggcaatccagattctggaagtgcatccggagatcgacctgatgcttctggatatcaatatgccgcagatgaatggattccaggtgttggaacatatgagggagttacagtggattgatgaagtcccggttgtcatgatttcatcagaagaatctgtcgaaattatgcgaaaagcgtatgatctggggatcacagactatatcagccgaccgtttgatgcagttatcgtaaagaaaagagtccagaatacattgggactttatgcaaaccaaaaacgactgatcaatgtggttgtagatcaggtctatcagaaagaagaaaacaacacgattatgattggaatcctgagcaatgtattaggttctcataacagtgaaagcagcgaacatatattacacatccgtgtcgcaacggagatgctgttgagagaattgatcaggaaaacagatgcgtatcatctgacagaagcggagattgctctgatcataacagcatcttcccttcatgacattggaaaggtcagcattccggaagaaatcctcaataaaccaggcagactgacagatgaagaattcaagatcatgaaaagccacagtgagattggagcgtctatgatccggaatatggattttccacaggacaagccactggtacgcactgcatgggaaatctgccggtggcaccatgaacgatgggacggaagaggatatccggatggactaaaaggggaagaaataccaatctctgcgcagatcgtgtcaattgctgatgtgtatgatgcgcttacaagtgtacggtgctataagaatgcatatgatcatgatacggcaatccagatgattctggaaggtcagtgcggacagtttaatccgcttcttctggaatgcctgaaagagagcagtcctcagttgtccagaacatttaagaaagaaaaggatgacaacagagagtattatgaagcgcagaggatctcagaagaaatactgaggcaaaatgcattgccatgcaaggattattcccagcgtgttatagagatcatgcaggaaaaaataaagttctttaaggagaatagcggtaagatttcaatggagtataatgcgatttcaggaaaactggttttaacagacggagaatcgcagaaagagtatcagagagatcttccgggatttgattcatatggagtatatgatataagcgaagaggatattcagcgcgtaaaagattcgctggattcagtatcaagtaaaaacaaagaagtttcaataaaagtaatgttaaaagtaagaggtgaaaggcagatgtgtgatctgaaactgcacacattatggtcatcaataaaaacagatggatatatcggaattgtcgggcagttggatattgtgaagtaatgtcacaaaaatggaagacaaaataaaaagagtcacagttgttccctgatggaacaggctgcgactcttttctgttcagatattcaagcagctgcgtaaagtgttctgtagagcttcttcccgcctaaaaggatcttacctttggacggtatctcatatcagacactgtatacactgtcacgaatgcttccggatccttcttgataatataattcatcagtttctgatattcacttttgtccacgatcgtaatgatctctctgtgcttctgcatattatatgcgcctgtcgcctcgtagaatgttgctccgctatgcagttcatgcaagataaactgacggacttcttcttcgtattttgtaataatacatacacgccgtttcagattctggccaaagataaaatgatccagcacaataccattaaaataagttccaagcacacttaaaacgacagctttcttgtcatagatcagagcggaagaaagtgccacacacatgcccgagatggacattgcttttcctaattctatgtgcagatatttattcatgatcttcgctacgatatccagtccgccggaagatgcattcatgttaaataaaatactgaggccgatacttacgaccaggatatagcatattacatccagttcactgctgtttgtcagcgaggtaaaatccggaaatatgtgttcaaatactgcaagatacaacggcagcaggatgctggtgtaaaccgtctttgctccgaactcctttccgcatgtcacaaagcctatcagcagtaggacaacgttcaatatcattgtgatcgttgacacatgcaacggtatataatgcgacataacaattgccagcgcggatatactgctgatcgaggtcatactcggaatcaaaaagaaatatacggccgcggcgataatgcccactgctatcgtcatgatggctgtttctttcaacttgtcggatgtgaaaatctgtttctcttgtttgttcatttatcattccccatttttagatacttagtattcagaaaaatcagataccagtatttatattatatctctaatatattcatggagacaatggttaattttatcagtcgcaattacagcggtcttgcagtttgaaattgcaaacctttatgtgacaaacctaactgcctatgatattataaatttgatataagcgaaaatgacttttgcagaaacgaaagtatctgagtacaaataagcaggaaacagtattgtaaggaaataagaatacaggaggaaggttttatgattcggcttcaggatattgcagatatggcaggcgtcagccgcaccacggtatccaatgttataaatggcaatacgaaaagagtttcccagaaaacgatcgataaaatcacggctattcttaaagaacagaactatgttccgaatatgggttccatgatgctttccggtcatggttccagaattataggcgtagtacttggatttacttacgctcatggtatgcagtcacttcaggatccattcgtgggagaactgattggaacgattcagatggaaatggaagaaaatggatattatgttatgcttattggcggtgaaagcattcagaatgtagtggatattgcctcaaaatggaatgtagagggattgattatcctgggatacaatgaagagcagtatcataacctttcgcacagattaaacaaaaaaatgattttgatcgatgcttatccgaaggggacttatacattccagaatgttggtatagatgattattcaggcgggtatcagatcggagaatacctgtattcctgtggatataagaaagcattgtttgttgcagaaacagagcaggacagcgattactatcggtggatgggattcaaacaggcgatggaaaaacaagggggattctgcagtcgttccagatatatagttattccgggtaaaagaaatcttcgtctcaggaaatacagagaacttcttccacgctttcttgaagcaaaagcgctggccttttcttcagattataatgcgatagaagcaataaatttcttttttgacgaaggaatcatggttccggagcagatttctgttacaggatatgatgacagtgtttacgcgagcatgattcgaccgaaactgacaacagttcatcaggatattccacaaaaagcacatgtggcgttggaacgtctgatgaaattgattcagggagagacgctgaacgaattaaatataaaaaacccagtctatctggtaaagagggattctgtcaaagaatgacaggattctttttttacatatatatgcgagcaggtgcaataacctgtttttctttgtataaactgtataaaagcaggaaataaactttgttaccttttgtggttttgcgagaaacctcttgatactgcaaggatgaggtgagtataatgaatggtgtggttgcaggagcggtcaaataattagaaatgaggagacttggcatggagaaaaaatggtggaaagaaagtgtagtatatcagatatatcctaagagttttaaagacagtaacggtgacggcgtgggagatatcagaggaatcatacagaaactcgattaccttaaagaacttggggtaaatgtgttatggatttctccgatgctggaatcacctcaggacgataatggttatgatatttctgattaccgtagaatttatgaagaatatggaactatggaggattatgaggaattgttgtgtgaagcacacaaaagatccatcaggattctgatggatcttgtagtcaatcatacatcggatgaacataactggtttattgaaagccgcaagtcaaaagataatccatatcgtgattattatatctggaaagacccggtaaacggaaaagaacctaataactggggaggagcattcggcggttctgcatgggaatatgatccgcagacacagatgtattatctgcatctgttttcaaaaaaacagccggatctcaattgggaaaatgaaaaagtacgccaggaagtttacgatatgatgaaattctggtgtgaaaaaggaattgatggtttccgtatggatgttatcagtatgatttccaaagatcagagatttccggatggagaaatgaataacggactttatggcgattttggaccatatagcgtacatggtcccatggtccaagagtccatgaatttcttcaggaaatgaatcatgaagtcctttcaaaatatgatatcatgacagttggtgaaacagctggagttacaattgaagaagcacagaaatatgcgggtgaagacagaaatgaactgaatatggtattccaatttgagcatgtggagagtggatgcggagattatggaaagtggacaactcaaaaatatgattttaaagagtttaaaaacatcatgatcaaatggcaggagaaactccagggtaaagcatggaacagtttgtttttaggtaatcatgatcaaccgagaagcgtcagccgttttggaaatgacaatccggtatacagagaaacatccgcaaaaatgctggctacctgtattcacatgatgcagggaacgccatatgtataccagggggaagagcttggtatgacaaatgtttattttgacaaactggaagattaccgtgatattgaaagtattaattactttgaagagtttacggaatcaggtcttatgactccggaacacatgatgaaatgtctgatgctgagaagccgtgacaatgcgagaactccgatgcagtgggatgacagcaaacaggctggattcacagatggtgagccgtggatcaaagtaaaccaaaactacaaaaagatcaatgcagcacagcagcttgaagatccggattctgttttccattactatcagaaactgatcagcttgcgcaaggagaaagaaattattgtttatggcgaatttgaaccgctttatcgtgaagacgagcagatttttgcttacacaagaaaaggggatcaggaaaaacttctgaccgtctgcaactttagcgacaagaatgcagaagtagaagtgccggaagaatttaaaggcgcagagtgtctgatcacaaaccttggaagaaaagaattcgacggaaaaattattctgaacccatatgaagcatttgtattatattataaacaccaggtgacagagaaatgattagaaaatatagatatggaactccatttaatacggaggcactgactgaaaaaattgaaacaactgagggcgttctcccatatggagaggtcagtcagaaggaaggatttgtttttacttatatcatggatgaagatgacattgtctatggtctgggtgaagccaatcgtggaatcaacaagagagggtattgttatatcagtaattgcacagatgatccggtacacacagaggacaagcgttctttgtacggagcccacaactttattattgtgagtggaaagactacgtttggattgttttttgactatccgtcgaaactgacctttgatatcggatatgacagagaggatacactcagggtatcctgcgaaaatgccgatctggatatctatgtgcttgaaggtgagaatgcttatgatatcgtaaaacagttccgccacgtaattggacgcagctatatcccgccgaagtttgcttttggtttcggacagagccgctgggggtatacgacgaaagaagatttccgtactgttgcaaaaggatatcgggagaatcatatcccaatcgacatgatttacatggatattgactatatgcagtcattcaaagatttcacagtgaatgaagaaaatttcccggattttccagaatttgtgcaggaaatggatgaccaggatattcgcctgattccgatcattgatgccggtgtgaaggttgagccgggatatgagatttacgaggaaggtgtcaaaaacaactatttctgcaagagagaagacggaagtgattttgttgcagctgtatggccgggagatacccattttccggatatgctgaatccggaagccagaaaatggttcggggacaaatatcgttttctgattgaacagggaatagaaggtttctggaatgatatgaatgagcctgcgatcttttattcttccgaaggccttgcagaggcaagagaacttgccggaaagtttgcaaaggataccgaaggcaagacccatccctgggaaatgcaggacaagatgctcagtattgcaaataatccggaagattacaaaagattttatcacaatgtcgatggcaaaaagatccgtcatgacaaagtacataatctttttggctacaatatgacaagagcagcaggagaagcttttgaacgcattgacccggaaaaacgttttctgatgttttccagatcttcttatatcggaatgcaccgttatggcggaatctggacaggcgataataaatcctggtggtcgcatatccttcttaacctgaagatgctgccgtctctgaatatgtgcggtttcctgtatacaggtgctgaccttggaggatttggcagtgatacgacaagagaactgttgcttcgttttcttgcacttggtgtattcacaccactgatgcgtaatcattcagcaacgggaacaagagagcaggaatgttatcaatttgaaaaaatcgaggatttccgcgctgtcattaatacaagatatcgtcttgtgccgtatctgtacagtgagtacatgaaagctgtgctgaatgatgacatgtatttcaaaccacttgggtttgtttatccggatgacaagagagcaatcaggatagaggatcagctgatgcttggaaacgagatcatgatcgctccggtctacgagcagaacgcaagaggccgttatgtttatctgccggaagaaatgaaatttatcaagttcctgccggacggaagcatttctgaagaggttctcgcaaaaggtattcattatgtagatgtggcactaaatgaagtaccgctcttcattcgaagtggtaaatgcatcccggttgcagaagtggcagagtgtgtgaaagatattgataccgaacatctgcagcttatcggatataaaaacagcagttatacgatgtatgaggatgatggaatccacaaggattacgataaggaagagaattatcgggtattcacaaattaacttttaagtgcaaagaaaaaatagccaatgttaatttccattgcttgtatcggaaacagcatattcgtataatttataatgtacatgtacatatcgaatagaagggatatgaaattatgattaatgagaatataaagcatttccgaaaaacaaggggaatgagccaggaagaaatggcagtaaagttaaatgttgttcggcagacagtttcaaaatgggaaaagggattatctattccggatgcagatgttttgattgaaatggcaaatttgcttgatgtatcggttagtcaattgcttggaattgaggagagtatccatagtaatgggaatttggcggaagaattggcggaactaaatgaacagctggcaagaaaaaagcaaaaagaaaagttgttgtatcaggcaaaccagaaaagaggtctgattctgtttgtttcatttttatctatgatgattacaatgagtgtgaaaaatgaagtcgtatcaattctaatggcaggaatatgtatgctgattgcagctatcgtactgtatcgtaatttggctttgtttacaagtctaacaactgacgatttaagaattggtattttccgtgttaccacactttgcaatattagcattttaatcattggtattgtttttgcttttctgagtgcagttgatgtcattactttttcggaaaatggagagaaactatttgctatggtattattgtcttgcataatggtttttataggtattgtatcgccgaagttgccatataacagacataccggccttcgtttgccatggactgtgcgtgatgaagatacctggaagattgcacatagaattttaggatttatttcatttccgatggtattgctgtatatagcctgtgcattaacaatttctgattttgagattgtgtctgttgtgacaatgcttatctggatcagtattccaggtggaatatcctatatttatttctataaaaaataccacagtaacaaaaagtaaaaagctatccattaaaacacagaaagtcttagttataaaatagaggatgtagaaattgggggagattatccgatggttcggacagtctcccccattatcctgttttatctccagaaatctgttttttgacgaagaccgatgtctgcacttttaaaaaccgggttgattccctgttttaactgcacttcataatcttggatcgctttaaatgcaatccctgataaaatcaggataaccggaatgttaatgagcgccataacccccatcagtacatcggaaagatcccacaaaagagacatctccattcctgcgcccagaaagattgcaagtgccgataccagtctgaagcctttcataaaagctttttccggctgttttttgtgaatgtagattaaaagattgtcacaatagaaacagtttccgagcagagttgtaaatgcaaaaaataccattgcaactgtaataaagatcggcccgaaagaaccaagtgattcctgaagagatgcctgcacccacggtgctccctgcaattcttttgccggatcgatcccggatgacatacacatcattgctgttgctgtacaaagcaacaaagtatcaataaatacggataacatctgtactagcccctgttttaccggatggctgacatttgccgaagccgatgcattcggagcggaaccgatacctgcctcattggaatagagtccccggcggattccctgcatcatggctgaaccggaaaatgctccgaaaattgctttgaaatcaaatgcttcttcaaaaatacgcacgaacattgccggcacgttctgaatattgataattactaccaaaagtgaaattccgatatacgcaatccccattaccggcacaaccattgaagttacttttacgatacgtgatccgccgccaagcagacaccatcctgtcagcactgccaaaatcccaccgatgatccagggactcatctttgcatcataaaaagaaaatactgaaaatgtagactgcagattataagatgccagcatattaaatccaaatgcgtaggttaaaatcattgcaacgcagaaaacaattgccagcgggcgacaatgaagtgccgcttcaatatagtaagccggtcctccataacagcttccgtcttttccttttttcttataaatctgtgccaatgtactctcgatcagtgcagatgcacttccgatgatcgcaatcacccacatccagaatacagaaccaaatccacctatacaaatcgccgatgaaaccccgacaatatttcccgttcccacacgggatgctgttgaaaccataagtgcctgaaaagaggaaattgcccctttatcctccggtttttccatcacggatccacaagcattcttaaataatcttacctgcggaaatcttgtgcggattgtaaaatagactcccgcaccaatcagtagaatgaccagcagcttgctgtacataaaagaactgattgcaccaataattgtttgaaacataccttctttcctttctctgtttgctgtcaatatattaacggaaagaagatggatttgcaagtttttttacattttagtacttggtttgaaaacggatggaagaataatacgatactgtgatagaataaggaaaatataccaaaaggatatatagcgatagttccttatattttcggaaatcggaaaataaaactcgttccgatatcttcgatactttcgacgtgaatggttccattgtggaggtttacaatccagcgcaccatagaaagaccgagaccggtaccaccattttctctggaacggcttttgtctatgcgatagaaacgctcccagattttgtccaggtgttcctcacttattccaataccatcatctttcacttcaccgacaatctggtcattttcgaccttcaggataacatgaatatgtccatttgtttttccgtaattgatggcattggttattaaattcatcatcatacgcaaaagcaatgtctggtcgccgttcataaataagttgtcctgcttttgcagggtgatctcaatatttttttcctgtgcttttgtctgcagttcttctattacaagttcgcttaataatccaaaatccagtttttccatcagatgctgctcatcctgttcgtttctggcgatcattaacatttcgcttgtcagctttgacattcgttttgcctgccttaagatgactgcaatctcttccttatcttccgcagataagttttcattttccaataagtactcacactgggaaatgacaacagcaatgggagtccgcagttcatgggatacgtctgatgtgaattgacgttccttctcaaacgaaaattccaagcgctcaaacatttcgttaaatttctccgacaattcgtataattcatcttttgcttttggcagagacaatcgtttggaaagatcttttccattgctgatgttttcaacttcatcgcagataagatccacctgtttcaatgcccgcttgatcataaaatatccgatggccccgatcagaataatgagtaatgggaatacaatcaacagcattttctcggatgtctgcatgaaaagttctatagaatgtacggaggtaattcctcgtacccacatttcctcatcatcaccgtaagtgtaaacgctgtcatatatcatccattttcgatttgatccggttatcattcgcggtgtattcgacttgaggatagtttcttctggaaattgggttggaatcgttccataaagtaagcgtccgtttttgtcataaatacaaaacataataccgtcatcgtaaaattcggtatcgccgtcaagataaaaggaatcatcctgaaaattaatatttgaagagaaaccagtcactgcggcactgatttcttcttctgtcgcagaaattccaaccttatccacaaaaagaaggacgagaactaaaatagtcccaagaactacggcaatgattccggtgtaccatagcgtaatttttttcttgatcgtcagctgtttcattcgttttccctcattacatatccgacaccgcgaacagtgtggataagtttttgttcgtattgtgcatcgattttttttcgcaaatagcgaatgtatacgtcaatcacattggaaccaccttcaaaatcaaagtcccacgcattctgttcaatctgctgtcttgtcattacgatatttttattgcgcataagacattccagaaccataaattcttttgcagaaagatcaatttcatttccggctcttgtaacctttcttgtgtcacgatccagaataagatctgctatttttagttgattggatgtaaattgtggctttctacgcatcatgacacggattcttgcaagcagttcttcaaatgcaaatggtttgatcaggtaatcatcggcaccaagatccagtcctctgacacggtcttcaatgctgtcttttgctgtcagtaacagaaccggtgtatcatcttctcgttgccttaattctcttaagatttcatatccatcctttcccggcaacatgatatcaagaataataccatcgtaggaagtcatatcgatataagccatcgcttccagaccatccccacaggcatctacactgtaatgttccttgacaagcctttttttgacaatgtttcttaaatcattctcgtcttctacaatcagtaatctcataatgtaattattataataccaatcattttcgtgtgctagagtcctttttttcattttttgaaattactatttgttttaatctttttttaatcttccccctatatgatacatataacagcaaaaacaaaacatccaagagacggaaggagaacatgttatgaaaaaactattagtagttttattatctctcacattaatatttgcttttacaggatgcacttcatccaataatggagcgacagaagatatagaaattaagacacaggaagtggtaacatcaaatacagatgacaatgatgataatatcagtaacacagaaaacgcagtagagaatgcgaacgaaaaggattatgatttctcttcttatgaaaacgatatccgtaatataacaaaaagtgtaaacaatgcaaaaacatctacaaatgcatctgagaatcacgaacaattctacgctttgaaaaaacaggtagacgcagtcgatgacgaactggataagcttgacgatgaatttgagtatgcttaccagatgaaagagattagcttcgagacatacaaagcgagagaacgcacgattgaaaaactggaagatgaactggaattagcagaagaagcactggaaaataaatacgacattgatgattaattccatatcgacttcttcagaaaccgacaaaagcaaatgtatctcctgtatgaggtgcgtgtccatatgcccagttcatgcaagaaagatcagccagcttatgacttcggtcgctgccgatgagagcgttatggttgatatgtctaaggtcaacgccatcgcatttgccccctaccatcacggcagatatgatgaaagtaaatctgctggcaattggcgcagtttttatagtattgttgtttacaatgaaatctctcatacttccaattatattggtactgaccattgtttgaagttttttctacccatagactgttgtcacagcttggctattttctgggaagaggaacggttttttccatgattgcagtgctgtttgtacttccatgctttttgtatctatcagatggtatctgcattgagaaaaaaagaaaaagttctttggcatatgatgcctaatacggatatgaagcaggctgcactttcaagtctctatggaatcgataacgccggtactggatatcaaaatctcgcaccggcgttattgattgtaattatcttactttgatataatcataaattgtcaaccccgccaactggaattgagatttcatgtattccaaggaatttaataattgttatattttattatcaaatatctctcaagcccttgaaaacactaagtttatcgcaggtgagctttcccttattgtttcccttgtattatattgtcccaccagtgtttacgaactctgataagggcaaatacaagggcaagaaaatcctataaaacagtataacacaaaattaaaacgacatggtgaactgattgaaatgcttctatttttttaacaaatgattgattgaacgataaggagatttgatacgatgagaacgatatttgcagaatacaatccacacagaaacagcattgatgtatataccagtgctggctatatgctccgcattgactgctgggaagcagaaaagaatttaaaaacaacacctggatcagattgtgcgttaaatgcacttgctattgatgaaccacttgaatatgcaagattgtatcttgatggaacgatgcaaatgtgggtagatgcggaagattccttagaaatttaattcaaagataaataagggacaaataacccttttagatttatttgtccctattattctatattttttcacttctgacaatgcagatgaaacttttaaatttggtattttccagtatcattgttcagtttttattgcaccagacagggcattgtatccattttgtttgtatgtattttcccctgttactcaatcataatttccttgatagaaatcttcttaattttttcagaatatatatacatcataatttcataaatcgtgataaaacaagcaagagaaataagcatagtaggaaagtcaaatttatacataggtacaccctcgacatccttaaatacaatatccaccataagccgaagcaatccatactgatatactgttccgattataaaaccaatataggacagcggtctgtatcctcctaaaattgccctgcaacattctttctgtgaatagccgaatactctcatcatagcaatagtttttgtatttccgtttattactgtagttatagcaagaaacagagttgtaaacgctaatacaagtccgatgaccaacatcatcacacccatcatttcacttgataaatctttcatactaaacgacatttgtgtcatagctgaaaagcaaaacgaagcaaaaataatgaagaatacaagtgcctttttagatttcaaggtattccttttcaaatactctacaaacgacaattcactgcttttttcgattctatgatttggtgttttagaagcagtttgcatattatctttcaaaagcagcaacacaggttttttgaatttgtaccaggcataataaactgaaagtgccgaaaaacacacagtcggcaataccacaaaataaaataaaatgcttggatgaaaattgatagttatctcaggaagcattttatcttcattttgtagagcgtaaaaccacggcattataagaaatgctcctgcatatccggttacagttccaataaatatactaattccgaatacccaaaagctttttgcaattttgatatttgaatatcccaacgcctttaatatcccaagttccttcttatgcgtgtcaatataatgcttaatataaaacaacaacataacaatcgcagttaaaagcaagcatccgccacttacaaggcaaacgacttttgcggtagaaacctgagcattataaaaaaacattgataattcagatgtaatttcactctcaattaatcgaatatcaaaataaaagttcagaaacattgtacaaacaagaacagcacaacaggctataatggaaataccgatgagttttgaaacattttttattccaacgagcataccatcaccaccctatctcataagcagtcttttgtgcttcatttgtgtaaatttcagatatttttccgctattcatttttataactgtgtttgccatttccgcaatattcaaattgtgcgttaccattacaatcgtaaaaccatattccttttgaagtttacatatataatcaagaacctgtcgtcctgtttgttcgtctaatgctcctgtcggttcgtcaagaaataatactctcggtctttttgccaaagctcttgcaatagatactctttgctgttcgccacccgaaagttcgctgggatatttatgtagtttttctccgagtccaaccgctctaatgacgtttttataatctttattatttgctaaatcagcacccatttttacatttttatcaacgctcatattgggtagcaaataatactgctgaaaaataaatccgacattttccttacgaaatgaagttaattcattatcagaaagtgctgtaatatcctttccgtcataaaacactttaccgctgtcagggcgttcaagacctgaaattacattcaaaaaggttgacttgccagaaccagatgcgccgagaataaccacaaaatcattatcctcaatatcaagactgatgtcctttaatacttggaatcggctttctccgttttggtaggattttattatatttctcgctttaatcattattttctccttccttcagctttttcaaaatactcatacatacctcagtaatcattgtactgatttcttcgtctgtaaatcggcacatttttgtggcacaaagcgttgcaattccgtgtgtatatatccaaagatgatgatacagttttttcccagctgccttgcaaattttgtaatcatcttgaattgacaatagaatttgctcataactttcatctatcagcggaagtacaccagataagtcaggaatttgtttttgctccgtcataaagaggagttgaaaaagcttaggctcattaacagcgaagagaatatattgtgtacccacccctttaaacggaggctctgttgttagtcctttattgacatattctttatacagagctttagcagatttaatcatatcctgctgaacctcctccatatttttaaatacagtaaaaatgggtcttgccgaactaccgagatatgttcctaacgctcttgaagtcaaagcctcatatccgtctgccctgacaatatttaatgcggcttcaataatttctgcttttgtaaatttggcttttggtggcatactttatctctccttttactaaatcgcttgttttaaatcagctgatttaattataattgaagcccacctgaaagtcaataaggcggcagagattaattccttcagccttattgactgcttatgaaaagatgatttcttcgttcataatatcccaattgctacactttgttgtattgcgttatgcgtttttccagcccttgcttttaccattatgaacagtcagggcaaggggaacatagtgtgaaatcatataaagggataaagcgaacacattacaatgaatcctttgttttcaaagcttttgtaggattttattaaaatacaaagaggtgtgattaagcacatatataaaattgtgtgtttacaatcggatttttaataatatccccttgtttcccgccagccttttacataccacctgattccaacatataccagttgcacgaataataagaaaaatagcagattgatcggcaatactgtctttatccaatctccaaaatagattgctattgccatgcttataagtgttaccagtattgtaatcatatcccagcagtatttcttatatagcccggcaatctttatcccggtgaatgctaaaagtatttctgcacccaccagacagccaccgcaaatcaataatcttatcagccagtatataattccggtaatgacaggattggatattccattactaatctgtgccacattctttcctgtcagtataatccaccctgcaatgctctgtataaaagttgcgattgtatcaaagaataccacgcaatcagaaataaagatttttgacagtattatctgaaaaagagtagtcgatacggaataccatatcagcaaaaacatcaatgcttcatacatggctgtttttgctttatatctgcctgccagtttttctctctgcgtatcatacctttccttcgctctcagataagctgtctggttacaattcccacacttttgatagagtaccggcttttcaaccggtatctctacttttttctgatgggagagtgcatagtcccgttcctgttctgcctgtcttagcttatcgcgacattcctctatcatgtcctttgcggtgagcgttttctctttctcgctctgcaataattcttttgttttcctcaagtcgttctttaaggcttgaatgttccctgctctgttctcgctgtttaacctctcgttcaaggtcagcgattcgtcgagctgcactttcagtttcctgatagtccggtctttctggtcgagttcttcctgcatctgctccgtcagcattagcagttcttccagttgatcgtcgttctttgagtttcttaattcgttcatcaatcaaccttcctttctctaattgctgttcaagttcagtaattcgctgttctgtttctgcaatagccggttctcgctgttcaatttctgtgccaattcctgccattgctgattttcgtctgtgagtttctgtatctggtctgtcttttcttccagaagcatcaacagttcttctgtatccggtaagatttgtagcagctctgacaattctttctctaattgctgcaatcgttcttcctgctcctgaaagcacatcagcttctcgtccttttcctgtatctcctgaagcatctctgccatgatattctgctgttcctctatctgtgtaatcattgcttccatcatgggaattacttctttgctttcttctaatgtcattcaaccactccttccatattgacaatgcaccggataccttaccaaaggttgtgattaccttttgcagtagtgcattttgttttttaatcatctggttttcctctaccttccatgaaccattccatatctgtccggtgagatatttttcctcaatctttcttgcatccgcaccctcatgaatcgtagggatttttaatttgccctgtctttcataagagcggtggtcaatctgattgtctatggataaatgccggttacacatcccagcccattcgcttcgccataactcacaattctttggattattccagccggtagcatcggtcagaacccgtttccattgttttcggtttcttgccccgactttctgtactccgttttcatcaagtaccggaatgcggattccatgccgatcaggatttttcttatcctgccaccagtccgggtgggattcatcaaccacgatatttccgtcagtatctctgacaaaatcccagtccttgacttctttgctgccccatgaatgatccagattgaatggtcgcatggttacaagtaaatgcacatgtgggtttccatcgcccttatcgtgtatgctccagtcgacacacattcccttatccacgaaagtcttttgaatatattcggttgtataatcaatctgttcctgtctgctccattctttcggcagggaaaattcaaatgagcgtccaagctgtgcatctgcatttttttctatcttcaatacctcattccatagacgctgtttctgaaatgtgattttaaacttttccagtgcggcatctttatcatccgctcttttataacggatagactgttgaaacctttttatattttcttccggtacatgcagccattcaggaggtgcattttcgcacatcatcagactggtgtagacgacttcctttttggaagtatagtaactgattctgcctgtttcctcattcttcatcacatctccattaagatatgccgatgcggatatgacagattttcctttactgcgcccgacaatctttactgtaaagtgaaatatcgccatgatataattccccctttctgccgtatccggcattgatttccgacagcatcttcttctggtttggcagaagtgaagctgtcggaacgccctctgcgcaagagtgccccctgcggcatgagcaggtctggctgaaagccccgccgacggaacgagcccggcaagcgtaagcgcagaccggttgccacttgtggcaaacttataaggacgacctctggttgtccataagtgcgcccttcattcaaaggcaatgaagggaatggaaaaaccactccctccgccattacacttcctccatatctgtaagtggctctttctgcatcgcctttgagaaaaacttcccgtttgtttcctgcctttttaagaagcctatcaactttggtaaatcttcctcctcaatcggacagccaagaaccgattccactgcgccaccaatctgacagagcctgtgggttcgttttttactttcctctgctttctttcgcttttccagttccttccgctgtgcaatgagcttttttgtagcttcaatgctttcctgttcctttttctctaatgcacgtattctttcttcataagtctttgttgatttcgccatatcgtcttcatcctttctttttccgataaacaacagttcccggttgcatatcaggagaagcacatggtataatcctcttgcgtgtaggtatatcatggcttcggtctgatagaacctttggcggtttcttaggaagccgcctttttaagttgccacatttcttgtgacagcttttacatttcctttatccctcagatcacgcccctcgttggcttccatgaacttttccagaatgtcagttttaataaggacttttcttccgacctttaataccggaagcttcttccattcaaccagctttctcaaagtgtttctgccaattcctgtatagtcggctgcttcctcgatggataatgcaatctttctttccgtcatcttgtcacctccttataaattgcattatgcaatttttgttgtgctgttagtatagcggttttatattgtgttgtcaagcgttatgaaattttaaaaataattattatattgcatattgcaattatgtgaggtacatgctataattcatacataccgaaaaaggaggcaatcagcatgaaagataaagaactacgcaagctgataggcagcagggcaaaacagcgtcgtctggaattaaatctgacacagccttatgttgcagagaagatgggagttacagcttccacaatcctgcgttatgagaatggttcgattgacaataccaaaaagatggtgctggaaggtctttcggaagcacttcatgtatctattgaatggctcagaggggaaaccgatgaatacgaaaccgatattacggataagaaagaattacagattcgtgatgcaatgggcgatattctcaaacagttacctctcgaccttagtaaaaaggaagatgctttttccaaagatttactgctgttgatgttaaagcaatataacctgtttctggaatcattccagtttgcctgcaagaattacaagggcaacacgaatgaagctgatattgcaaaagtaatggggtttgaatcgaatgatgaatataacgagattatgtttctccgggagatcacccacactgttaatgcctttaacgacatggcagatatcgtaaggctttattccaagaaaccggaaatggcagaacaaaggcttgaaaatcttttatcagaagttttgtatgaggattccgattcggtatagaacgacaaccggagttatgatatacttacacgcaagaagcatttcatcagttccgattgtctgatatcgaaaggagacacacgattatggcaaaaggatctgtaagaaaaaaaggaaagaaatggtactaccgcttctatgtagaagatgcaagcggcaatctggttcagaaagaatacgctggaacagaaagtaaaagtgaaacggaaaaactgctccgtcaggcaatggacgattacgaaagcaagaaattcattgcaaagtcggaaaatattacaattggagaattacttgatatatgggcagaggaagaattaaagaccggtacgctcagtaatgggacagtccagaattacctcggtgccattaccaacatcaagaagcatccaatttcagagagaaagttgaaaaatgtaacatctgagcatttacaagccttcttcaatctgctttcctttggtggcacttatccagatggttcagaaagaaaaggttatagcaaagattacattcgttctttctcggcagtattacagcagtcattccgatttgcagtatcaccaaagcaatatatcactttcaatccgatgcagtatattaagctgaaataccagacggatgaggttgacctgttttccgatgatgacatggatggcgatatacagccaattccacgagaggattatgaaagactgattgaatttctacagaattacaatccaccggcaatacttccaatccagatagcttattatgcaggacttcgtatcggtgaagcctgtggtctggcatggcaggacgtgaatcttgaagaacagtgccttacaatcagacgcagtatccgatatgatggttcaaggcacaagaatatcatcggaccaaccaaacgaaaaaaggtaaggattgttgattttggagatacactggcagagattcttcgcaatgcccgaaaggaacaacttaaaaaccgaatgcagtacggagaactttaccataaaaactactacagagaagtaaaagacaaaaacagagtttactatgagttctatcatctggacggaacagagaatgttccagaagattataaggaaatatcctttgtctgcttaagaccggatggaagtttggaactgccaagcacgttaggaattgtttgcaggaagattgctcagaaactggatggatttgaaggatttcattttcaccagttgcgacacacctacacaagcaaccttctggcaaatggagcagcaccaaaggatgtgcaggaactgttagggcactcagatgtcagtaccaccatgaatgtctatgcacactctacaagaaaagccaagcgggaatctgcaaggttacttgataaagtggcaggcaatgactaaataaaactttcccttatttcccttacgattatctcataagggcaaaaataagggaaaatacatatcgtttcgctaatgcacaggctggaaagcctgtaaaatagggaaagttagaaatatatttcggcaaacttgaagttgtatcatcacttatctttatctttttttgaaaaaataagactgccagatatgccaaaagatatacccagacatattccgattccaattccagccatgctatttaatgagtttatgaaaacaacgctccaaagtattgctgcgattattccgatagtgactcctataattacctttttgattttcattagttttatcctttaattcccgattttactttgtgactatgacttttccttccgaatccagaagaggtgtaatactggctccaaatccggagttccaacaaaggtaattaaccccagtcttcttatctacaaggatttgacgaattccttcatctttaagccaacttccgtctctgaatgtaacttcaaatctttcttctttctttgccatgtttatttctccttttttcaagcgttaaatcccgatttctatttttgtttccatagcatggtgtactctttttcaccagtagcttcatctaaatcttcacattgaataatgaacccttctctttggtaaaaagaaattgctctggcatttttctggtatacatttaatcgtaagctgatttttttatccttaatataatccaataaaagcttgcctatgccacatgactgcatttcatcagagacaaaaataccttcaatatattcatcatttaatcctataaatccttgtatcattttatccgcttcaaacacatagacttcggattgtgacatcatttctttcactaattcataattacttttccagtattgattggaaataaaataatgtgctttcagatttgtctttaaccatatgtcagcaactctatcaatatctccgttcagcaactttctaatcataaccaatattctccccaactacatcctttatgtttttctctttttttcattctatcacaagcttaccattaatcattatttttttgatattttttatttcctatcgtaagtacaagatattttcttgtttataactattcttttctaataaaaagtgaaaatgcaaagtaagcgatatctgtaacctattttgtgaaagtgaactataatcaattaacgttagtgagttttttaaatataaaggagtcaaatcagtgtgatttggctccttgtttcagcttaactataataacgatatagcaggctgattttggacaccataattaaaaattttatcaaattaattttgtcgcattgcataaaaacgtgtagatgtacagaaatggggagtgtaagttttcagagcgaacgacagaaagcggactatctgaagaacatctttgcaaatgtctatctgaaggacgttatcgaaagaaataagattcagaacgtggatgagattgggattctggttgatgtgcttgcatctgcaatcggcgcaccgaccaacccttcaaagattgccaatacctttgccagtgagcgccagatgacttatactaataaaaccatctccaagcatatcgaccatttgacagatgcctttttgatttccaaggcaatccgatacgatattaagggcagaaagtatatcggtgcaaatctgaaatactactttactgatctgggactgagaaatgcccgtctgaatttcagacagcaggagcctactcatatcatggagaacattgtttataacgagctgctgatccgtggctacaatgttgatgtgggtgtcgtgaacatcttcgataaggataaagagggcaagcgtgttcgtaagcagctggaggttgactttgtggtgaaccaaggcaaccagaggtattacattcaggttgcttatgacatgacttcggaagaaaagcagactcaggagtttaattctctgcgtaatatcccagactcttttaagaagattgtcattgtaaatggcagtaagaagccttggagaaatgatgaaggttttgtcatcatgggaatgaagtatttcttgttgaattcgaatagcctggaattttaagtcgatttgagttgtttgtgcctggaaacggtcaattctcggattctgagagtgattctgagtctattgggtggtattctcactactaaaatcttagaataaagacgtagaaagcaaaccacctatccaaaaggaggactcaatatggaaaagaaaaccatcggcggttttattgccgctttacgaaaagtcaatggaatgactcaaaaggatttggctgaaggtgattcttgatgagtgtaaagatggctttgatcaggatacgatcgataggatgaaatcagctgtccagaagttcaatgaacaggaaaaacagaagggagctaccaaagaacggctttcggtatggcagaaatactttatcaatggggaataccttcgatctgcagaaatggcagaggaacagaattacaatatgatcgatggaagaatcaacaatctgctaccgaaaaaggagaatccagaagtaccaaagaagaggaaatctgtccttttgcgtttgtataaacaccgctgtgaggttgcaaagaaacagggaaagccaatgccgaggcggtatcaggggatggagatggagcggaatcgtaaatagataagaaatgacaaagggtgtgggagaaatctcattgcccttttttgaaaaagagttgtctgatatatatataataaccaagtgagaattgtaaattttgctgaaaatataaatgaatcgttgataatattgtgcataaaatggaaaaatgataaaatcaaaaatgtggtgaatataagacatattatttttgaggaacagagtgatttagggaatagtatgtctttttagcatgttcaattagtagatccgatttcgtaagtttaagatcaagatataaatattgaaggagcaatatgaaaatacgaaaatatgtgaaaaaagatattataaaagtaacctcaattttaattttactactaggattattgactattttatatttgtcagaaatacaaagtatatcaggatatgttgtacaaattaattatcccaataatattgctataaaagacgaatttgagaatgtatattggataaagccatttggagattttgcggataaatatgagataggggaggaggtaaaagtatattattatccgaattcagaagatggctccaatgaaaatacattatcccattctattgtattcagtagatgatgttgttatttatgaaggaggcaactaaatcagagctaaacaaaaatttaaattaagtgctactattataggaatatgctttttgttacatggaatacctgcatttgcagccgaatcaagtgaaatgatagagtttgatttaaagactaatgagatgaagacagtagaaattgaggaacaaaatagtgattcagttgactcatacattccagagggaatcagtactggaattcaaacatatggagcgattattgatggtgatgataggtatagaattcctgctagtttatcaagtacaactttcccatattgctcttatggtgttgtgagttgtactaggcccgatggaacaagttcatttggaacaggagggctttttggtccgaacgatgtggcaacagctgcgcatgttgtatatagtcaagagaatggtggatatccttcttctattattttttatcccggggttaataacagtggatcaatagtaggggcatcttataaggcaacaattgcggtgctaccggcaacgtatcaaagcgaacgtgatgcgacgaaagattatgcttttttcatagtaaaatagagcggcgtataccccctgatagataatatcgaaaaaactctaaaaagggatcattacgacgctctatgtttgaaagcctcagcaacaaaatcaaatctgctaaaagaatagattatggttacaggaatgatgagcactttttttcctgattattattctgaaacaagtcttttaattgcagtcttatagatttctttagcaaggatcaaatcagacaaatagatatattcatttgcctgatgttctgtcaattctctacctggtagcatagggccgaaggcaacaattccattcattgctcttgcataggttccgccaccgatgaccgttggttcgctcatgtctccggtttcatcgcgataagcggaaagaagagtttggataacagcaccgttcttgtccatataaacatgaggtttatttgtaataacctctaccttaacatcactgaaaccattttctgaaagatgactattaatggcatttacaatgtcttcgagattgaaggttacaggataacgtaagtcaatgtatagaacaatatcatcgccaacagtttcaatcttaccaatgttgtagcttgctggaccacttgcttcatctgagacctgtccgccaagactttcgccgttatattctagcttaataaattcgtggaagaactcaataagtttgcaatttgtaacaactccactcagttcattcatcaactttgaaatggcgttttctccgtcctcaggagtacttccatgggccgccttacctgttacagagagagtctttgtttctccatgaacagagtatgacgcagtgcagctgtcgggaaccatatttatggctgttccgccagaaacattgttgaagcaagtatcggacttcttaaaagcaatttttagtctcaaacccgtagctcttgcatatttctagagctttatttagggccatgtgtacaccttctccaaaaggataagcgctggacaagtccttttcgcacacactgttgatattaattatagaacgtaaatcatcaatcatcttttccatttttatcactcccttacttcttcgcgatagttcctcgcaataatttctaaaacaaaagccgatcatatattattatacaaccggcctttgtacatcttcaattatttttcaaatggtttgtattcaacatcaaatccaaagtgcttaggtccgaagcattccaaaccttctggagtagtccagatttcaggggatggaagtgcaattactgtcatcttatcaccaacttcaaaattaggtgtagtcattggatttccttctccgttaatcatgcagattaggtctggagcaattacatcaacttcgccattgcggtatgagatgatgttttcgttcttaaaccagatgcgatatgcttcgtccgtataatttctttcgccctttagatgaatttcaccaaagttgaagccatctcttgtttcacaagtgtaatctgaaatgtggcctctgaataatactttaccttctttatcatcacagatagcagaagcaacatctccgccagcttcctttgtttctctaagaactctaccgatttcctgagcgtaagtaattgcaccaggaattagagaattcttgataaccttaccaacgtttgcgtgatcagctacacctacaaggttgtcacttacaacagcaatagctctaacgatatcttcagctcttaggtcatccgctacattctgaattacaattttttcaccaaattttgtagctacgcccatagggaaaataggaacgttctttacatagtatgtagaatgctgcagttcaggaactgaacgtccggctgggtcagcgtcaataagaggtaaatccattaacagtgcaacgtgaagagcctcagctgtattttctccacctaattcagttgagccaattgcatacattttcttacctaaagattcctctagagcctgtacagctaaaactgcggaagctgtttcgctatgcttcagatgagctaatctaggatcaggtttagctgatggagcaccgcaaccataaggagtaacaacatactcgtcatctggaagttcatctaaagtgattaattttagagtttttcccttttcgaaatgttcttctaaaagagccaaaccgtcagcaagtggaccgccaccaccggtaccaagcactgcacatccgtacaatagatcgatcatgtcctgtttgtttaattctctcatttttctgtctcctcttttttgtgataatttatgctatattttcggcgttatctcttgatgcagatggaataaagcgctctgcaataagatagataacaaaacctataatgataccaacgaattcaattttaactagtgtataagaaataattgcacctaatgcccaagcaattacaccagcccagtttacaccgtcctgtggtctaaagttcttagctttaccttttcctacaacccagtagtcagcaagaattactccgccaacaggacaaacaacgtatgatagtaagcttaacactccctcaatatgtcccaagatacccaggtcgcataatacaataccaacaattcctgaaattaaagtagcttctcttcttcggttatctttaagcttaagtgccataacaatgttaagacctgcgctgtaagcatttgttgagttagttgtccatgttgaaataacaagtgcaatgatgcccaggagtggaagtcctacttcaattagaaccatactgatatcatactgtcctgatagctttgtaagaacgattcccataatcagagttattacacccattgggaatacaccgtagaatacagatttaacagtgtcttttctgcttttctggaatctagtatagtcaggaccagtgattgtacctacagcagtgaagttaaatgatagtgctacacctgacatgaagctcatagattgtacagttccttcatcgttaaggtttcctgttccgtaaaccttaaatgctaggaatgttccgtagcacataatgatcattagtaatggaatagaaatcttgtctagtttttctagcgcatgcactccatatactgcagtcagaagcattatgattccccaaattgtgtttgaaactacaactggaatatcccatccggtcatagctagcattgcgttactgaaggcttctccacatactccattctggattccaaaccagccaatcatgttaacagcaaagattgtacttacgataaatctagctccgctttttccaaagccggcctgacagcatgtgcaggatgctagtccaaggtcacagcctatcattcccgttgcaaccatacctactactacaattaagtagcctagtgaccctgaaataattgctggccatataggcattgctccgcctaataacgctcccaataggaatgcaggaacgcatacacatatgccggcctgaacgaaggctaacgaaatccagtcttttctgtcttcagcagaaatcgcctgcagagctgtgacttctgctttcttacctttattttcatttgtactcataatgggtacctccttttgaatcttctctatgatagcacacattattataaatgataattatgcagatgacagaattatttatcaatcatattgtgcttttgcacaaaagccttgtttatgactgtgagttttgatatcataaaggaaaaaattatactaggaggagccatgagtgttactgttcaagattgtttaagactaccctcttttcattctgcgagagtgattgcaggcaagaatggactgggtagaatagtatcatcagtatctgtaatagaaatacctgcaaagtctgtagaggcaattagtgtattcaatcccaatgagttgttagtcacgtcattttattcaattaaagatgatcctactagacaatgcgaggaaatgagaaacttatatgatgctggaggcgttgcactagtgctgttttacgtgggtgacgtcatccctcaggtgtctgacgagttgttgcagactgcagacgttatgaacatacctttaattcttattgaagacgaagcagaatatagtgttagttatagtgatgtaattaaagatgtaatgggggctgttttctacgatcaggcatctacggattccttttcagacactgtggagaatagattgaagcagattccttacaataaaagaagcatggaaaccctgctaaatgtaatagctgaaacttataactgtaaccttgtgctttataacaaaaacggtttatatttcacatctatatataagccgtcctttggacaatttggtccagaattcttttttaatgccttcgctgatggctcaacggactttttctgtaaaagcataatgttgcaggataagtcattttatttgtatagaaaagagttcccccacgcaggaaatacctggcttacattatatgcttcaagcaacgaaaacagcattagtgaacacaagctagatgaaatttgtgcatgcacaaatttcttctcaaccttatggggctacaccctcgatatgcagaattataatactgttattactttgatcttgaaatcatcgcgcgtaataggagaaaaattccttgaagctagtggtgtgcctttttctaagctttcaactattcttgtagtagaatcggaaaaagacaatttaacagacattcttcggcagattgaaggcatattgaaggaaagtgaaagattctacgttaaggatattattgacgacagacttgtaattctaagttctataatggtttcccaaaaggatgatggcattatagctacggaaatagaaaaatgcataaacgagtatgagggagccttgtttttcttggagtctagcaaaaatctaacttcaatgaggaaaatatactcagacttttgtgcaaattcagcagcaatgagcaaaattttcatccaccgaaaatttcgcgacatgtatgatgttatattttcgcaggaaatcacaaatctagctataaatagaggcaatcgaaacgatcaaatcaaatccataatagaagccttaaaggacgacagtgacaacctgatggaaacccttgcagtgtacctaatcgactgcgactcccagttgagcaccactgcagccaccttgtttttgcatagaaatactgtgacgtacaggcttaataagataaagcagataacaaacaccgatttcacccttatgccggccacctatgatttttatctagcagctgcgctgtggcggttaaacaaaaattcctaatgtgagaatttcaaatcaaagtctatcactcgtgattgacaaaatatgacgagggctttattgcagtggtgcgctcggtgagcacacccttacatacaaaattaggagaatcttccattttgtatgtaggggtgtttcagccctcctttagtactgcgattcgtgttgtgatcagttgtttagtctgttctatatatttctccggcaaataggaatcttcacatgcacataaaagtttgtcttctagagaacacattttaggcacagttttgattccagcaattttggcggctaccatggcgaagttttcgaattctggcaaattatcatattcctcagtctgtggtttctatttcaatttctactatggtttcgcctttccaattacttttttcttttactttctgcatgatttacctccttatcttaggacgacaaaaaacccgtccaaactagaattttttataaatctagtctgaacgggcatgccattcgttcgttagcaggactgtaaatttttcttgttagcaaatgactgctttttattagctgtcagctaacatttttatggatttgttagcagaaacagctgattttcaaagcaattatttttcgaaaaaaagaaaaagcggataacgattttgctaattagctaatcatttccgcctcttatcaagcgttccctgtaggaatcgaacctacaataaagtcttaggagttatacagggagctgtcaatgtttgatagtttctgtatgaaaaagcccgatttttcttatgaaaaacggctttccaatttttatccagtcaattactgtaatcagctataaaccttagataagtacagcttgttagcaactttttagctacagctaatatttggggaagtatgtaatgatactaactacatcaatcctatgactaccattcccttagaggtggaaatgatatctatatttaattgactagatttatatttataatatacaacgtgagcgtgtatttgtctatggaaatttcgactactttttatttttgaaattaggggattttccaataatgcatttccattaaaaccaacgcttccttatagacgctatattatttattctttccaaataggtgcaaaaaaagagcatttacggttttacggtaaatactctttttactgccaatattcaatttatatcattcggttttcataatcttgtaattcatggaaaatatcatccacatatacaacatcattttctattctgtacaacataaagtatctgtgctgttgaaaatttattcgacgatatccaaggctctgtaaacgcggattgtcgcatacattcaaactactcgctacatacttcaactttttaatagtatcctcaaaatcatcaagcacatttttggctgcctgcttatttttcttggcaaaaagcagatactgtataaactggttcaagtcttcttctgcttcagctgttacaactactttataatccatattttcctctcatatctgaaatcacatcatctgcatttcggtaatttcccttttttgaagattctctggattgttccagtctttgaagcatctcttcttctgtcatagatgtataaggattatgcacagttcgttttatttcaaatggaaatccattatatgcaaccgcctgcgttaaaaacatccttattgctgatgtcgtatcagttccaagatctttaaaaagctgatctgatttattttttaagtcatcgtctaccctgatctgaattgtacttgccattttagaaacctccttttttcttcattataatgccatttcattgctgattcaatacaattgtattgatgttttgctcgcttttattgaataatttctataggcatgatggagatagactcactacttttcattacttcattgtcttagccagcgaattaagcaacgcccgcatttccggattcgccagagctttcatcaataattccatatcgacttcttcagaaaccatatttggctcaagattatttttcttgtaaaatgcatcttcaaataattcagcgttcttttttctgtcttcatcaataatatgggaatacacatctgtaaccatatctgtctgggaatggccagaatcgccctgcacagcttttatatcacctttattgagctttaatttataggtgacactgctatgacgcaaactgtgaaatacaactttggggagatgatgttcttcaattagtttattgaaggatactcgaattgttccggattctaatggagagccaaattcacttgtcatcactaagttgtaatcattatattcctctccaaggattgcttttgtattaagttgtttcagtttccatttttgcagcatttcggcaacacttcttggtagaaaaactttacgtacactactttctgttttcggtattttcagaacaagaagagtagtattctttgtatgacttcttctatctaaaaaataagtgtatgttacaatacatttataaaatatgtagggggattcagaaactatgaaggaagcatttaaaaagcataaaaaagttgtcgtatttgttgcagctattataattattatcatatgttgcattgctggttatatggcaaaaatcaaatatgagcagaaacaaagaaattaatcaagaaatatggaacccgagatccatttgagatcatggatcagatgaacattgttgtcggggaaacttccagatataagacactgaaaggatactgttttatgagctgtaagacaatctatgtcatgatcagcagtttcctttcagaagaagaaaagatgatcgttgccgcccatgaattagggcatatcatcctgcatcgttcccagctgaaaatggctccaatgcaagatgataccctctacaatatgacggataatacagaataccaggccaatctgtttgctgccgatcttctgattgatgatgaagagattgaagatatggttcagaacgaagacctggattatttcggactctgcagctctttgaatgcgactccggaactcatgagctttaaactatacagcctgacaaaacgaggccaggcttatcatatgccgatggagatacagagtaattttctggcgaaataatagcggataagattattctacaatagaaaaactatagatttatctcactgaaaggaggatcatttatgtcaagacatcatatagaaaaggtaacttgtccttcctgccatcatgagggagattttgagctctgggacagtattaatactgcactggatcctgaaatgaaagagaaggtacttaatcaatctattttcctttatacctgccgagctgtggagagacctttcgtttaaactactccacactctatcaccagatggaagatcttgtcatgatttatctggttcctgaatcagaagtaaagaagacatatgaaatattttatgaaaaaaatgctttggctgattatcgtaccgaaaagtacttataccggattgtgacatcagcaaatcagctcgttgaaaagatccagatctttgatgcaggtaaagatgacagggtaatggaacttgttaaattacttgcgacagattctattctcaaaaatgatcccgatatagaatttgatgaactgcgctttgctgtcgacgacgacggaacaaatattcttgtaatcattaataagggtgagattactggtgcagttgacattgacaatatgtatgaatttgcttcttcacactgcaatgatttcaaggatctccgcgatgatgatgaaatagttatcaatagggagtggatccttaacaaacttgccgaagcagaaaacgaatagtatatttggtggctacacccccaagcccctgtagaataaacaacgccagtactggatatcaaaaatcccgcaccggcgttatttattaaaatattttgttttttaatcttcaacactctctactgaaacttcttttttcttcctacttttaccagaaatcatcttgtgtcctgtataaatagccataatcatgcaaagcaaagaacttgctgcaaagtacttatggccttcttttgatcccttataacctgtataaaaagttccaagcattgtaatcagtgcaccgatagaccaatatttatgtgatttcattcagatacctcctgccgtttttcttaatcatataccttttaaaagatatatacaaactggtattttgaatcaatcgacaagcagctcggatcttccactataaattcataccttcagcaaataggatatggcaataaaaatatatccggagatttctcttcctactggatgcagtcatccttaaagatttcaccagtagaacaagttgaacttttgaaaaatttatatcgaaacaacttcaactttactcctgctaatattcatgccgtcaaaaattccatccatcttaccgcctctgaaaatggagaatttatggaaaaaccggaaccggacgagtgaacgggcaggatataaatggctggtttataggttttatagaaagccaaaataatacatactttttctccacaaatattcaaagcgaacaacgtgcaactggtagtaaagcatcagatggtgctttatctactcgtattgattcgtcacataaatataagcatcttccaacgttgcaggaattgacatacactccaattctggctgtatttcagaaatcactcttaactgcaatcccccctcaacatactgtttagatgtaatacgatacttctgttccacttctcttgcttttctctcatcaggtactttgcaaatccagattttcccctgtgcttcttctgtcaaattcttcatagaacccgcatacagaaatcgacctttatgcataattgcaagctgattgcaggtggcagctaagtcttctaccacatgagttgaaaacaaaaccgttctgttttcagaaaaatctactaacaaattgcggatgcgaatacgttcctccggatctaaaccggtagttggctcatccacaattaaaaattccggttcatttaaaagcgcctgcaccaatcctacccgtcgcttcataccgcctgataactgcttcattttcttcttacgatgttctataagactggtctttttcaaataataatctatccgctttctacattctgctttcggaacacctgccagatctcccatatactccaaacactcctgaaccgtcaaattaggatacagttcaatttcctgtggtaaataccctatctttcgttggattttttcatagtttccttcgctatacaaaattccgtctaatgtaaccattccgtttgtaggtttaagcacagtggtcaaaactctcatcaaagttgtctttcccgctccattttctcccaatagtccaaatatcccatttggtatatctaaatctgcatggtcgattgctgtgacactattcttaaatcttaccgttaaatcctcaatatgaatactcataaatttaccctctctttcttacgatcttcggcaatgccagtaacaaaatcagtccgatacaaatacacaagcctttcccatacagccatgtaatatcggcagtattttctatatctctaaaagaataagaaaacagattccatgctccaaaaagtttatctccacctgtggaatttgttgctacccatatcaaaagactgcttccaattcccatccacatattgcgaaaaagcatagacaatgtattagccaatattccccaaaagaaaatagttactacaatcgccccaaaacaggtaataaactgaagtatttcactttctgttactggatgtgtaattggtttctgaaacgcaaaaaacaatccatatccaagaacagcgagcagcagcaaaaaagttccctgtatcatcagtctctgtataatagaatagattctcttttttatctgatacagtctctgaacttcggaacggttgcttgtaatttcctgcacataagtatctgcacaaaaaacagcagtcaatatcgcaaaaggcggctctatggatagtcctatttcatacgtgaaaacaactgcacgaatcacacttaaaattacaacaaaggatactgcataagcaattttataaaatggcagaacaatcttcatttccttcttcatttatattcgcctccgcttccaaatctgtatcgaaatcagtataattactaccgatacaataataagaaaactttgatttaagagcgccatcgggggcggtgtcgtatcaaaaagctgccccggaaatcgtaccatgattgccaaaggtttgccccaatatccgtaaactccctctgcattagttccgcccaaattggaatacaccatataaagaatcaaaagtggtacacccggaagtggatttttaaatatgagtgaaatcaatgtatatatactcacaatcatcagcatattaggcaatatataaagtaccgtagaagccacaaaatcccatagtcgcacttcaaatccactatcctttgtatagatgcggcacaatacccaaaacagtatattcaaaatagttagcacaagcaaacaaattgtaaatcctgcactcacttttcccattacatacttcccggcagtcacaggctttgtatgcaacaattcataagtatgcttttttgtatcttgtaaaaataaaaccgccaacataataattgcaaaaaacaccatatacagacccgcaaaatcagcaaattttcttgcgtaataaaaagaaaatgtcttatcttccaattttttatctagatatgcgttgatttcttctgccgttcccttataatacgtactgtcctcgtataaataccttgccccgtaccagtcatattcctgctccaaatacgcataggcctcttttaaattcatgctttccagcttttcaatgacattctgtgcttctgaatccgtcaatccaaacacatccgttaattttatttttaccttttcatgccatacctctctgtgcttttcaggcgtggctggaatatagccctcatacacttctccttcaaccgaagtgttggactgatcattgatgatttcctcccccgttgtaagataatgtgtggttaaatatggacttgtcgcattaaacacaccataaatcacaagcagaacacctacccaaaataacggtcgctttagataattcctaatctctcttttaaaaatagcaatcatacgtattcctcctttccttcgttatagacatcataaaatataaatcacaacaaaaagacaacagcataaaaaaatcggaccgctcatgcaatccgatgaaatactgctgttattacagctccactctgtttttcattttctatcagtaactgaccaccatgcttttcacaatacaatctgctgatatacatgcccattcctgaatgtttcaaactgtctttcacattttgctgataaaaaagctctgttgccttttgcttatctattgtaaatcccactccatcatcctttattctgatctgtaattcagaacaggtaagaaacacttccatttccacttttgtcttggcgtaacgaaaggcatttgacaaaaggttttctataacctctaaaatcacttccttatctcctgaaaatttttcttctgtttccgaacattctaattcatatagctttccaaattttttcctaaacacgttcatctctgcccgtacgtctatttctacctgtttactggtaatttcttctgctactaactcccttgtatctaaactgctcatctttcgcatagtttccacaaagatatccatacgttcaatctgttttttgctttcatttaccatttctaaggcttgctccatatttatctctttcttcggaagatattctgaaagcatttcctgatacccctccagcacagagagcggagaacgtatatcatgtgcaatggcagcccgcaaagccttttcttcctcaagcattttccataactgttgattattctctgccagctgtcctctcattcgttcaaactctttgcacaatccgcccatctcatcttcattttcataagtgatatggaaatctaaattatttcgaccaacttgtcgggaagccagttctaattcttcgatagggcatttcagtttatgcttataaaaaagaaataccgctataatactccctgcaacagatacgataagcactgtaaatgtctgaagaaaatcacatatttccgatacatgataatcaaattctttcatttcataagaatgtggtctcggaacatctggcaaataccttctaccatccccttcagccatttcaaaatattcttcttggtctacataattccaccaaatgttgttttgtactgtgcttgctattcgcataattagtgctgaaagataaaaactaattattaaactaattatcatatacaaaacaatggttttccttaacgaaagattttttattttgcccatttatatcccctcccccataccgttgcaatatattcgtgttccgaatacattttcattttcttgcggattctgcgaatcaactccgtaaccacccggctgtccccttctgcatcatatccgccaatcttctcatagattcgttctttatcaaataccatttcagggttcatagacaaaaattctatgatctcatactctaatttcgtaagctctaaagcattccctttaatatgtacacatttactggcatagtcaatcactaattctccataaaacctttgttcttttttcctatgtaaacgttcttcacgtttcaaatgggcaataattctagcatctaattctttcaaactgaatggttttaaaacataatcatcaccaccagacaacaatcccattactcgatcctgttcttctacttttgcagtcaaaaaaataatcggacaggaaaccatatctctgattcttctgcacacttcaattccgtccattcccggcatatttacgtccaataaaataatatcgggatttgcacttatcttttccattgcttctatgccattttctgcaatcattaccgtataattcttcaatgtaaagtattgattcagcatttttagcaattctctatcatcatcaaccattaaaattttatagttcataaatttcacctctggctctaatgttatcttttccttatagtatagcttataaaaaacaacaaataaacaacaattcctaaaaggcaacagcctttctaaactgccgccttttctccttcattttatttccatttttgggacaacatcatacagggttggtgcctgatgacttaattttactccattttcatttgcatctttaagcagattcttaactttttctcttgaattctccggtactttcatgtacttccacataaatgctaccacatcagatggtgtgtctttttttagtggtggtaactgaatataatcattgttttcactcattttcatattctcctcacgatataataaaatcaataatacgttctcttgtcatgtccagtacagtatctacgaacactcctgcaaaaaggatcagatacagaataacactcagcgaaaacaggaatgcaacctgtacccaatcatggtaacagtatgcagtcgctatgatcaataaagtgaatataaacccaaggattcctctgacaaccgcataagtctgtactgtcatttttactgccaagccgatcacaaaaaggatcagccataccggcagtaataatatcttcccaacaagttttaaaataaacatgtgcacctcctatcttaccagtcctggcatatcatggttcacctctgcctgataatacccgttcatcgttgacggtgcattaaacaaagctgctaataaatatttcttgatgttcttcacctttgtggtgttaccactcatacagtgtaatacatactcgatatgtgaataggtcagcatcagaaattttttcttcaccagtgatgccggataccagttgctggcaatcaagatcttgtcatttttacacatcacagtctctacgatcaggttcacgatttcatctacctgccgcatatcgtcatgatgggttacttccagtgattcataatcaatggtctctttgacaaggttttcataagcctgataatcctcagagcgattatcgctatcaaatcttttctcatccacagatatgataggattagatttattatcattcatttcagtatcactaagattagtattattagggtttgaaatgtaaacttcttgaagtttgttttcgggacttctagaagtttgattttgggacttcatgaagtttgaattgtaaacttctgcgggttcctcattttccacagaagtttgttttttaaacttctttaattcctcttcaaattttttctcatctgttttctcaggcataaaggttttcacgtagatgacgttcacctttccaaatccctgtctacgtttctcaatcaggccaatccctgtttcgtcatccagttctctcatggatttgatggctttatttctgccacagttcagtaattccataatatcttcgatggaaaagtagatatatgctctatttttgtcgtcaaaccactgattcttgatggaaagagacattcgatccaacatcagtccatataaaattttagcatcgcttgataaatctttaaaatagctgtctgtaaataatgcttttggtatgcggtagaagctgaactgatcagcttcggtaccataaaaataattaaatgtcatttttttctccataatttcctcctttcattttctgctaagaagtcctttttttaaacttctttgacattgttttcttagctttttctctccttaacaggactgttcctgcatccacttttctaataatgattcaatcacctgctccatatctttggctgtataatcatccggaaaatactttgtcagtttcttttctgagaaagtaagagaccgggatactttctttgctatcacacagttattgaaaattgataacatctgaatctgattgattgacccgtcattcagctgatttctgagtgctgcaatctgctttggcttaataaatccagtgtcactaatatattcgtaaatccattcttgtacttccttatcgatgtaggagatatcaatagcaactgtaaattggagctttttcttatctaccagatctaaaagttctggtattaattccgtgagacgaatatatctttgaacctgtcgtccactttctccattatcctttccaatgagatctgccgtctcataattcccgacattttgtcggggattttcttttgtcggacgacctgctgttcttctcatagcatccattttcatcttatatgcaaatgctttctcactcggtaacagttcctctcgctgaatgttagcgtccaccatcgcaatcacggcatcatcatccgataattctcttacgattgccggaatagtcgtaagtcctgcaagctgtgctgcatgcattcttctatgaccggataccatttcatattcttcattatcatccattcgaagcagtaccggtgtcagtactccattgatccttacactttcaaccagatcctgcatcttttcatcatccagcaccttgaacggatgatttttaaacggatggatcttactgatttctatctccattgcagattcttcatttaccacacccagcagttcatcaatgcttgccagtttaatcttttcgccacttctatttttcatttttcaaaacctcctgtgttaagttcttatatgcttcggcaacttttcctttcgggcagtgcatgtagatgctttttccctctgcactggtctcagcaacttttacagacatcgggatcatattttcaaatacctcgatctgacttccgtaggttgtatgtactctcgatgcaatatcccttgcgtaattggttctgaaatctaccatggtcaggagaatgccctcaatcgccagtttccggttcagtcttttctttactgtaagaatggtcttgatcagctgctgaagtcctttcaccggcagatatgcggcttgcacaggtatcaacacagaatcggaagagaccagtgcattgattgtcatcataccaaggctcggcatacagtcgatcaggatataatcgtatcggcatcgtatcgcatcgatatattctttcatgatcatttctctgctcataacatttcccatcgttacttccagtgcggaaagctcaatatttgccgggagaagatctacattttcctggtgatgtaaaatcccatcttccagagagatttcttcttcgttgatgacctccatcatgatcgttgccaatgtgatgcgaagatcatccggttcctcatatccaagacttgcggttaaacttccctgtggatccgcgtcgatcagcaacactttcttaccttctcttgccagtccaatgcctacatttacggttgtggtggtctttccgacgccacctttctggtttactacggatataactttacacatgatttcttcctcctttaactttcccatgattcttttttccataatttcaacagtgccagtatttcccgtttcatcattgccggtgtataagaatttggaaaatacttgtgcaactgctcgtttgtgaatgccactcttgtgatctcaccctttttcacttcacacatgatctcttccatcttttccagtgacaactgtttttctttactcagttgccggatcctctgggcctgtgagagtgatgggattgcctgtgcatactccattgctacaagcagttctctttgttctttttcacttaatgcagctatctctacagccggacaaaaagaaataatctcatcatccagtttctgcaacatttccggtatcagttttgtcagtgagatataacgctgcacttgttttgggctatcaccacaatcttcactgatgatttctattgcccgctttcttggtgttttgtggtcaacttggctcttttttcgaccactttttctttttaatacgtcattcttcagtttgtaagcaaaagctttttcactgtagctaatccgttctctgtgaagattggaatctaccatgctcaagatggaatcatcttcacttaatacccggatgattaccggtactttacggtatcccagtttctccgcagcatgttttcttctgtgaccggatatgatctcatagtatccatccggtactggtctgacgattagcggatttaaaatgccatacttctcaatgctttcctgcaaaagaaacatttccttatcatcttttacctgaaacgggtgctctttgaacggacgaagacgctcaatctcaatttctatgattctttcttcgttttctcctgattgtctgtttggctcagtcatcttgactcctttcctccaggattcaggaaataaaaaatgcctgcctggaacttttatagatagtaaagttccaaacagacattgctgtttgaccattagctgtagctaatagaattgaatactgtttcagctaattcatgtttgcaagtttgggagagattgtttcttttcccgccttttctctgatttgcatccccgaataagaggtgacaacggagcggaacccaaatgttagctggacttcttaaaacccatgtttgcaaaccggtaattttgattagctgtcagctaacaaaaatcggattgcgttagctggaaattgatcattttgaatggaattttgtgtcacgaacgtgatttgaaaataacaaaagcgttcgttgtcagctaatccagctaacattttcgaacgctttgaagcccgtcgccaagaggatttgaacctccgacccctcgcttaggagttctctgtgaaccgtggtagctggaagttcgattatcctcttgggagcgtttaatgccgtaaattaaagcgtaagtgcttgttatgtttagttgttgatattctctggtgtaccctcatacgccgtagagtgttagcaggttgttagcaacaaaggctaatttaaagctttaatttattagaaaacattacaatcaaactataaatcatttatcactagaaatcaagatactcgtatgttatagacgttcagaaatgagcgtctattttaattataaaaatgaaaggagcattagatttatgaaaaagacatggaaacgattgtgtacgggcttcttagctcttgcaactgtcgttactgctttaccgactacacccgttcatgcagaaagcaagcaatactggacagaaagtgccgagcgtgtcggtatcattgaaaaagtaatgaatgacggttctatcggttcgacattcaatgagggctatatgaaagtcgagggcgaaactgcctattgtattgacatcaatacagattttaagaatggctacaagaccagagctgacgcaagctcacgcatgagtgccgaccagatttcagatgtggcgttatccttagagtatgtcaaacagtatggcgaagctcacaaggaattgaactacaaacaagtctatctgttggaacaatgtgtagtctggcagagattgagcgtacatcttggctggcaatgtgataacgtgcgagcttcttataatgaaattccaaaggctacgcaggacgaagttttctctggtgcaaaagcctttgtcaaagagaataaaggacgctatgaatgtggcggttatatctactctggcgaggggcaggaattagggcaattctgggcgaaactgaatgttggaaatgcgaaactgcaaaagacttccagtaataccagcattacagacggtaacgggaattactctgttgctggtgcaacatacggtgtcttttctgataaggactgcacgaaacagcttgccacccttacgactgatgaaaacggaaatacagatgttgcagaggtaacggctggcacagtctatatcaaggaattatccgcaccagcaggatataaagtggataaaacaatctattcattgacaatcaaagctggcgaaacagcaaccttgaaagtatcagatacaccaaaagtaacagacactttgattgagcttttcaaaatagatatggaaacacagaaagacaatccgcaggggaacgcttctttagcaggtgcggaatttacatggaagtattatgctggcttctataataaagacaatctccctgccgaagctaatcgtacatgggttacaaagacaatcgctgaaacagacagcgacgggacaactcactacatcacaaaattagcggacgcatacaaggtgtctggcgacagcttctatatgcaggagggcaaagccgttcttccacttgggacactaaccgttgaggaaacaaaagctccaaacggctacttgttagacggtgcatatatgcaggctggcgataagtccgaacagataaaaggcttatatgtaacacagattaccgaggacggcgaccttgccgtattatctggaagtaaccagttttccgtatcagacaaggttatccgtggcggtgtcaaaattcagaaacgagatttagaaacgggcgatacaaagccacaaggaagtgccactctgaaagatactgtctttgacatcatttccttaaatgataattctgtcttggttgagggcaagctatacaagaaaaatgaagtcgtaaaaactattcgtacagatattgagggtgtcgcttctacttctgctgacctcttaccttatggaaaattccgtatcgttgaaagtgaagctccaaatggatatttgacagacggtgcaaaaccgattgattttacaatcacagaaaatggaaaaatcgtggacttaaccgacaaagcccattctatctacaatcagattaagcgtggagatattgagggcgtaaaaatcggtgcaggcacacacaagcgtcttgctgatgttccctttaggatcacaagcaagacaacgggcgaaaatcatgtagtggtaactgatgataacgggcaattctccacttctgctgaatgggcttctcataagcacaatacaaacgcaggaaagaccagtgaggacggtgtgtggtttggaacttctgaaccaggcgacagcaagggtgcattaccttatgacacctacatcattgaagaaatgcgttgcaacagtaacaaaggctttgaacttatcccaccttttgaaatcgtggtagcaagaaataatcttgtgattgatttagggactttgactgacgaatacgaaaaagaaatctctatccataccacagcgaccagcaaagacggcgaaaagactatccttgcaggaaaagaggttacaatcgttgatacggtcaaactagacggacttacaaaaggcacaaagtatcagttgaaaggctggcagatgttaaaggaagaaaacgccgagcttatcattgacgggaaatgtgtagaaaacgattatacctttgtcgctgatgatgaagaaatgaaagtggaaatttcctatacattcaatgcgtctgctttaggtggcaaaaaccttgttacctttgaagaattatatgatttcagcaatccagacgaacccgtaaaagttgcagaacacaaagacattgaggacgacgggcaaacggtacttatcacaaagcgtatcatcaagatacatactaccgctaccgataaggacggcaacaaagagcttaaagcaggaaaagacgttacaatcattgataccgtaaccttagagggcttagaagtcggtacacagtacaaacttgtgggctggcagatgttgaaagaagaaaatgcagaacttcttatcaatggaaaacgtgtggaaagtgattacacttttattgctgacagcgaaactatgaaagtggaagctgcttttacgtttgacgctacttctcttgacggcaaacagcttgtaacttttgaggaattatacgatttaagcaatccagacgagccgaagaaagttaccgagcataaggatattgaggataagggacagacgattacttttaaggaaaagccagaagaaccagagaaacccgaaacaccaccgacaccggaaaagcctaacagacctagcgacagtcctaaaacgggcgacagtacaaatgtaatggcatttatcgtgatgttgcttgcgtctgctggtggactggctggaacatatctttacaaacgccgtaaaatgaagaaatcataaggcggtaacggtatgagaaaaggaaaatcacgctctccgccgaagctgtcaaacggcagatttttgcttattctggcttgtctgcctacaacctgcaagaacacggatagtcaagggtgcgtaagcattgattttaccctttactatctgggggattgctggtacttcccaaaccgccagaataagaaatcacaattaaaaaacttatcaaatatagaaagaaacgaggtaaaacaatatggaaatgaaatatgtcgtgccagatatggcacagtcttttggaactcttgaatttgcaggcgaaagcgagccagtctttgaaagagataaaaataatcgcagagtcttagccaaacgaagctataacctttattccgacgtacagaaaggcgaaaatgttgtggtagaaattcccgtgcaggctggcgaaaagaagttcaagtatgagcagaaagtaaaacttgtcaatccgaagttatatggcagaggttacgcaatcggggatatgggacataccgattatgtgttgcttgctgatgatattgtagcagttgaagaaaagtaaaggagtgaagaatttatgagattatcaaacgggtttgttattgacaaagagaaaacatttggagaattaaaatttacagcggtgcgtgatgtgttcttgcagaatgaggacgggacaccgagtacccagcttaaaaagcgtatctatgatttgaagtgcagtctgcatggtggaattatccccgtgtctgtaccgccagaagtaccgttaagggaatttccgtacaatgcagttgtggagcttgtcaatccagtagccgatacggtatcacgaaagacttatacgggtgcagatgtggactggtatgtaaaggcagagaatattgtgttgaaaaataaaggcaatcagaacgcaggcagtccacagaaccatacaccgcagggacagccgaaaaaataggcttactgaatagattttcattgtagcggatatatggaactgttataatatgggtatgaagaaacggacaaataataaggtgtaaaggagaccagctatgaaagataaaaacattttaatttgtgtgggaataattatttatattgctatgtctggaattgatagatttgtttatcatatacctaatattatttatataccagttgcaattcttggtattgctttaattttaattggctttttcaaagataaatttaaacaagaaaatttcgatttatagaactgaaaattaaagatttagaaaaggtggtaaatatgatagggctaatactaggtaatataatggtggttttaggggtattcagtattatcaaaggtaaattgccccttatcaaaagatataatggggtaaaaaacataaagctacattcaagaattgagggaacagctatattattagtaggaattatgctgatttttcaatgttttatatcactaggaaatgttgaaatagttatcattattttatcaatttgtattttttcgttgatactagaaattgcattaaaagtaatataaaattcccatttgcaaaacttcatatccatacacacaaagcagttagtcttaggattgactgcttttttcgtacccagaaaggagtgattgatttatgcgtaagatttggaataaaggacaccgtatcagagccagcgacaagcaccttgtctaccacttttccatagggatgcttctggtggtattcgtggcggttcttttgctactcaatatcaaacagcttatgcgtactgattgggagcatttcagcttgttagaaaacggcttgacgctctccccttacaacttcataaccatattgatagcgacgggtgtttgtgcattggtcgcttttctatattaccgcttctgttacgacagtttcaagaagctcctgcaccgtcaaaagctggcaagaatggtactggaaaataagtggtatgaagccgataccgtacaagacagcggtttttttactgaccggcaaagcagatcaagggaaaaaatcgtctggtttccaaagatttattatcaaatggaaaagggactgcttcatatccgctgtgaaattacgctggggaaatatcaagaccagcttttacggttagaggataaattggaaagtggcttgtattgtgaactgaccgacaagaccctgcacgacggctatatcgaatataccctgctttatgatatgatagcgaaccgtattaccattgatgaagtacgggcagaaaacggcagtcttaggctgatgaaaaatcttgtctgggaatatgacgcactccctcacgctcttatcgctggtgggacgggtggcggtaaaacttattttctgctgacgctcattgaagccctactgcataccaacgctgtcctttacgtcttagacccgaaaaatgcggacttagcagacttggggacagttatgggaaatgtgtatcacaccaaagaagaaatgattgattgcgtcaatgccttttatgagggcatggtacagcgaagcgaggaaatgaagcgacacccgaactataagacgggcgaaaactacgcctatttgggactgccaccctgctttcttatctttgatgaatatgtggcattttttgaaatgctggggacaaaagaaagcgtgagcctacttagccagttaaagaaaatcgtcatgttaggacgacaagcaggttatttccttatcgttgcctgtcagcgtccagacgcaaaatatttctcggacggtatcagagataacttcaatttccgtgtgggattggggcgtatcagcgaattaggttacggtatgctgttcggttcagatgtgaaaaagcagttttttcagaagcgtatcaaggggcgtggctattgtgatgtgggaacaagtgttataagtgaattttacacgcctttagtcccgaaaggacatgattttctacaagaaatcggcaggctggaagaaaaaaggactgcaagcaacgaaagctgacagtcctacttcaatttcaatatgtcgtttggggaacattccagaaaatcacagagctttgcaaggattgtaaggtcaattctggaaactttgttcttgcaatagttattaagctgtgtccgctgtaatttacacgcttcacagactttgtttttgctgatattcttctctttcaaaagattttctaaatcaatatatacctgcatacgctgtacctcgtcttttctttgaattataagatacaactgtattgataaataagatgtattatcgtagactgtattataatacaccctacaagaaaggacagtaacagtatgtgcaaaaagagaaaaataataacaatcacggtactttttgtgctgggagtggcggtttcctatctgcaatggggacgtgagattgatgtagtaggaagtatggggacttcatcagaaaatttccatgaagaacacgttacctttacgctcaaccgtcttatcattacagataaagaaaagtgtgcagaggaaatcatcaaaaaatgcagggagaatgattttgcttctactctgttcagctatgatgtggcaaagcccaacgctttatatggtacggtgtaccgttcccgtttttccatgaaaggacaaaagcctttgtttcatttccgatatacacagacagcggacacgctcggttcatacaacattgttgatgatccagaagcgttcacgctggtaatcgaataacgcaaggcaggacgggacggcgacgtgcgaagcgaaaggtgacggcacggactagccgttgctggtgtggcgtaagccacgccagcaggtaaaacccctcggtatctaacagaggggtacgtttgcaaatagacaatagacaaaaaacataggaaacataaggcttctggcatggtttcctagtaaaaatcggctgtgaagtcgccttaaaaaacttcacactttacagattgggggtatggttctgaatgaagaacaatggataaaagaattacgggagaaacggattgcttacggtatctcacaaggcaggctggcggtggcttctggtatcacaagggaatatctcaacaagatagaaagtggaaaaatgaagccgtcaaaggagcttttggaaactctacataaagaactggcaaggttcaatccagaagcaccgcttaccatgctgtttgattatgtaaaaattcgttttcccacgctggatatacagcatatcatcaaagacatattaaaactgaatatcaattatatgctccatgaagattacggacattacagttatacggagcattattctttaggggacatctttatctatacgtcggctgacgaagaaaaaggtgtccttttagagttaaaggggcgtggttgcagacagtttgaaagttacctgctggcacagcaaagaagctggtatgacttcctcatggacgcactcgtagacgggggcgtgatgaagcgtattgaccttgctatcaacgaccatacgggcattttggatattccagagcttgcggaaaaatgcaggaaacgggaatatattggaaagtccagaagttataagttctaccagtcgggcgagcttatcaagcacagagaggacgacagagaatatatggggcgtaccctttatcttggttcgctgaaatctgatgtgtatttctgtatctatgaaaaggactatgagcagtacgtcaagttggggacacctctggaagaagccgacattatcaaccgttttgagatacggcttcggaatgaacgtgcctattatgcagtacgagatttgctgacttattatgacgcagagcagaccgccttttctatcatcaaccagtatgtgcggtttgttgatgaagaaccagacaagcgaaaaaatgactggaaactcaatgaccgctgggcttggtttatcggcgataacagacagagcttgaagctgacgacaaagccagagccttatactttagaccgtacattgcgttgggtacaaaggcaggtagcaccgaccttgaaaatgctgaaaaagattgataagggaaacggtacagactacatggaaacaatcgaacagcaggcaaagctcacagaaaagcatgaaatgataatcaaacagcagacgacccctgcaaaagatttagtagaaagttaggagtgataaaaatgtgggaattagtaaaagacttcctgctggtatctatgggaatgggtatcggcatagtcttgatgtgtattttgaatgtcggcaaagaagctgactgtgaaatgaaacaattaaatgaaagcgaggacaattaaatgaatttcggacaaaatttatatcaatggtttttatcaaacgcacagagcttagtgcttatggcgattgtagttatcggtatctacttagggttcaagcgtgagttttccaaacttatcggtttcttggtagttgccttgattgctgtcggcttagtattcaatgctggcggtgtgaaagatgtactgttagaactgttcaataagattatcggtgcataaaattttattgcagtgctgatatgataatgttatgatatggatatgaagaaagtgacgaattagaagttgtggaggtagtcgctcatgaaatggtataatgatatgactgaacaagaaaaacgaagttttcaaaaagtaattgttgtatttgtagtaggtgcgattttaattctcattgttcctatggtttttcatgctattttctaagtaagagataacttccagttttacgatttcatatccacacacaaagcatttagtcttagggattgaggtgttctattatgagtgagagagaaaaaatcattcgtttatggtttgatatgtggctgaaacagcaagatttaggaatggataaaatttttacagaagatgttgtttatacggaaagctggtgtcctaaatatgaaaatctaaaaacagtaaaacattggtttaatgaatggaatacccgtggtaaagtcattatttgggatattaaacagttctttcataaagaaaatcaaactgtcgtagaatggtattttaaaaatgaaatgaatacgggaaatgttgaagaatttgacggtatttccttaattgaatggacagaagataacaaaatcaaatcattaaaagaatatggttgcaatttgaataactacaatccatatcagcacagcgataaccctcaatttagagatgaaaaaataagctggttttaaaacttaatcaaattatatctatacacacaaagcagttagtcttaggattgactgcttttttcttgccaaaatttcagattggagtgatgaaatgaacgatatttttaaggatatgcaggcaaacgtcggctgtgaatacatttccgacctgccctcttacaagcgtaaggtgtggcatgaaatgaaacggctgaaccctgccgactatgaagaaagacagttagaagatttttctaactatgtgtttggtatgtcataccagaccataaaagatgtgataaaacaacagaaaggacgtgaggaacaatgcaggaaacaagggtgctggtggaaacgagcggaacaactggcgaagaaacaacatcatactggttcgacctgccgatagatgttgcagagtttgaagaaaagttaggtgtctgtgcagaaagtggggattaccgcattatcgaaaaggtgttgccttttgctgatgaagttcacgaacacaccagcgtgtaccagctcaatgaattagattttatgtaccgccagctttcaagtgatatgcaggaagaatatgtatcactacttacggtgtttgagaacttagaagcactttatatttgtaggaacgtgattacggtttatcacgactgtaaaagcatgattgatgttacaaggcaaaagctgatgaacgacccgacgttcaaacatttatccgaggactgtcaagaatactactttgactttgaagcctatgcttctcacttgcaggaacacgggaaatttttagtaacggaacacggtatctttgaactgccagagtaagaaatgaggtggtgcttatgattgatgatatggcggtttacattgctaatcttggcaaatacaatgagggctatttagtcggtgcttggttcacttttcctattgacgaggaagatgtgaaagaaaaaatcggcttgaatgaacagtacgaggaatacgcaatccatgataccgataacttccctattgcgattggcgagtatgtttccattgaagaactcaatgagatgtatgaaatgatagaggaacttcccgactatatcgtagagtgtctggacgaatttatcagccactacgggacgctggaagaagtcgtagaacataaggacgatatttattattatcccgactgtgaaaccatgacagacgttgcctactactacatagacgaattgcaggcacttggcgacattccacccagcttacagaactacattgactatgaagcctacgggcgagatttggatatgggcggttactttattgaaacaagccgaggtatgtgcgagataccatactaacgctggaagatcagcgacaagcatggttgctactgacagcgtatttctcttttaagggacagtctgaaacatggctgtccttttctattttgaaaggagctgaaagaacttgaaaaagattaaatcttatacgggtatctggaacgtggaaaaagtcttgtatgcaatcaatgactttaacttgccctttcccgttacttttacacagattacatggtttgtgattacagaatttatcatcattctgtttggggatattcccccactttccatgattgagggagcatttctcaaatacttcggtattcccgttgctctcacttggtttatgtcgcagaaaacctttgacggaaagaagccgtacagctttttgaaatcacagataacttatgccctgcgaccgaaaatcacttatgcaggaaaagccgtaaaactgcaaaaggaaacattcaacgaaacaatcacggcagtaaggagtgtgaagtatgttcccgataaaatatattgacaataaccttgtctggaacaaggacaatgaggtattcgcctactatgagctgataccgtacaactattctttcctatccgcagagcagaaatttatcgtgcatgacagtttccgacagcttatcgcacagtcccgtgagggtaaaattcatgccttgcagatagcgacggaaagttccatacgaagtatgcaggagcagtcaaagaagctggtaacgggaaaattaaaggaagttgcctatcagaagatagacgaacagaccgaagcgttagtatctatgattggggacaatcaagtggactaccgcttttttcttggctttaagctcatggttacggaagaacagctcaatctgaagaacatcaaaaaatcggcgtggctgacgttcacggaatttctccatgaagtgaaccacacgctgatgaatgattttgtttccatgccgaatgatgaaatcaaccgttacacgaaaatggaaaagttactggaaaataaaatctcccgtcgctttaaggtgcgtcgcttggaaatcaacgattttgggtatctcatggaacatctttacggtagggacggtatcgcctatgaagattatgagtaccagctaccaaagaagaaattacagaaagaaacgctgataaaatactacgaccttatccgtccgacaaggtgtgtgattgaggaaagccagcggtatttaagattggagcatgaggacaaggaaagctatgtgtcctattttatcgtcaatgcgattgtcggggagcttgattttccgtcgtctgaaatcttctatttccagcaacagcaattcacattccccgttgatacttctatgaatgtagaaatcgtggagaaccgaaaagcattaacgacagtccgcaacaagaaaaaggaattgaaagaccttgacaatcacgcttatcaagctggaagtgaaaccagctcaaatgtggtggacgctttagacagcgtggacgagctggaaacagacttagaccagagcaaagaaagtatgtataagttaagctacgtgatacgggtgtctgcacccgatcttgacgagctgaaacgccgttgtgatgaagtcaaggacttttacgacgacctcaatgtaaagctggtgcgtcctgctggggatatgcttgggcttcattctgaatttcttcctgccagcaagcgatatatcaacgactatgtgcagtatgtaaaatcagacttcttggctgggcttggctttggagcgacccagcagttaggagaaactacgggtatctatatgggctattccgttgatacgggaagaaatgtgtacctgcaaccgtcccttgccagtcaaggtataaaaggtacagttaccaacgctttagcttctgcttttgtcggttcgcttggcggtggtaaatcgttctgcaacaatcttctggtatattatgcggtgctgtttggcggtcaagcacttctgttagaccctaaaagtgagcgtggaaattggaaagaaacgctcccagaaatcgcccatgaaatcaatatcgtaaacctaaccagcgataaagataatgcaggacttcttgacccatttgtgattatgaagaatgttaaagacgctgaaagtctggcaatcgacatcttgacattccttacgggtatttcctctagggacggcgaaaaattccccgtgttacgaaaagcggtgcgttccgttacccagagcgacagtcggggcttgctccatgtgatagacgagctacgccgtgaagatacgcccatatcaagaaatatcgcagaccatatcgacagcttcacggactacgactttgcacacctgctgttttcagacggtacggtagaaaatgctatcagtctggataaccagctcaatatcattcaagtagcggacttagtattgccagataaagacactacttttaatgaatacacaaccattgaattattatcggtggcaatgctgattgtgattagtacctttgcactcgacttcattcacagcgacagaagcatttttaagattgtagaccttgatgaagcgtgggcgttcttaaatgtggcacaaggagaaacgctctctaacaagctggttcgtgctggacgagctatgcaggcaggcgtttattttgttacccagtctgcctatgatgtttcaaaggaaagtctgaaaaacaatatcggcttgaaatttgcctttcgtagtaccgacatcaacgagataaagcagaccttagaatttttcggtatcgacaaggacgacgagaacaaccagaaacgcttgcgtgatttggagaacggacaatgcttattgcaggacttatacgggcgtgtcggtgtggtacagatacacccagtctttgaagaactgctacacgcctttgataccagaccgcccgtacagagaaatgaggtggagtgatgaaagaaaggataaaaggtgcgttcacaaaaaggaagatacttcactttctcaaaatggctctgttcgtggtggcactctcccttatcctgctttcacttctgggaacggtggctcatgcaacggggcttgtggacgataccataaacgcagaaaatctttactcaaaatatcccctttccaactaccaacttgatttttatgtggataatagctggtcgtggcttccgtggaactggctggacggtatcggaaaatcggtgcagtatgggctttactgcattaccaactttgtctggactatcagtttatatttgagtaatgccacgggctatgtggtgcaggaagcctataagctggacttcatcaatgatatggcagacagtatcggtcagagcatacagacccttgcaggcgttaccgagaacggcttttcttccacgggcttttatgtcggtttcctgcttctcattatcttagtagtgggaatatatgttgcctatacgggactgataaaacgggaaaccagcaaggcacttcacgccgttatcaactttgtggtagtgttcgtgctgtccgcttcgtttattgcctacgctcccgactacatcaagaagataaatgagttttcatcagacatcagtaccgcttcacttgatttgggaacaaaaatcatgctccccaactctgacagcgagggcaaggacagcgtggacttgatacgggacagcttattttctattcaagtggaacagccgtggctcttacttcaattcggtaacagcaacgcagaggaaatcgggacagaccgtgtagaagctcttgtatcgacaagcccagaggacgaggacggtaagaccagagaggaagtcgtgaaaacagaaatcgaggacaacgacaacaacaatctgacaataccgcaggtggtaaaccgtttaggtatggtgttcttcctcttgttcttcaatctaggtatcacgatatttgtattcttgcttacgggcatgatgttgtttagccagatactttttattatctttgcaatgtttttacctatcagttttctactttccatgataccgagctatgaaagcatggcaaagcaggcaatcgtaagggtgtttaataccataatgacacgggcaggaataacactcattgtaacggtggcgttcagcatttccagtatgttttataacatatccacggactatccgtttttcatggtagctttcttgcaaatagtatgtttcgctggtatctatatgaagctgggcgacttaatgagtatgttctctttgaacgctaacgacagtcaaagtatgggacgcaggatattccgcagaccatatctatatttggcacatagggctagacgtatggaaagacggcttgctggtgcggttactgctggcggtgttgctggtgcggtggcaggtagcacgatttcaaacagaaaaccgacaaggaacacagctacaaaagacagtcggggtaatacatcttccagcatgggacaacgtgcaggctcaaaggtgggggctgtcttagatacgaaaaataaggtcaaggataaggcaaatgctgtcaaagagaatatcaaggatatgccgacacagaccgcttatgcggtgtattccgcaaagaaaaaggcaaagtccagcgtgtccgactttaagcgtggcatggtgcaggaacagcagtccagacagacgggacgtttggaaaagcaggaacagcatagacagaatatcgctgacaaacgtatggagcttcaaaaggcacaagaagcaaggcaggcacagcgaaaggctgacggatcagcgacaacgggagctacccgtccccatgagcgaccagccacagcttcaaagccgagtgcggaaaaaatgcaggaagtcaaacgccctgccacagctccaactccgaaagcaagtgagccagtcaagacaaatgttatcaaagagcgtccgttatcttcgggtgcttctgataagaaagcgacccagtcggtacagcctgcacataggcagaatgtagaaaaagtggtatcgcaggaaacacgccagaattacacaaaagaccgtaggacaaaggttcagcagacgcaaaccgtccaaaagaaccagcagacaacagagaaaactcgtaaccttgtaacgaagaaaggacagaagaaaaaatgaaactgaaacatatcgctatcattggcagtctgtttcctatcctcttttctctggtgcttttctttggggtgttgattagtgcagacagcgacgacgagaacagcaatttttcttctggcattacgggtatgaacttatccgcagaagtcttgaaacatcagcctatggtagaaaaatacgccagagaatacggcatttccgagtatgtcaatgtgctattggctatcattcaagtagaaagtggcggtacggcagaagatgttatgcagagttcggaaagtcttggtttaccgcctaattccttagatacggaaagctcaatcaagcaggggtgtaagtattttgcgtccctgctttcttcctgcaaaaatcaaggtatcgacgatttgaatgtagcgatacagtcctataactatggcggtggctatgtgggatatgtggcaggaaaaggaaagaaacacacctttaatcttgcagagaacttcgcccgtgaaaaatcaggtggaaagaaagtaacctacaccaacccgatagccgttgcaaagaatgggggctggcggtatggctatggaaatatgttctatgtggaattagtcaatcaatatctgaccgtggcacactttgataatgcgacggcacaagcgattatgaatgaagcgttgaaatatcaaggctggaagtatgtgtatggtggcagtaacccgaacacttcctttgattgtagcggacttgtgcaatggtgctatggaaaagctggtatctccttaccgagaacagcacaagcccagtatgacgcaacccaacatcttccactctcgcaggcaaaggctggggacttggtatttttccattctacctataacgctggttcgtatgtaacccacgtcggcatttatgtaggaaataatcagatgtaccatgcaggcgacccgataggatatgcagacctaagtagtagttactggcaacagcacttaatcggtgcaggacgagtaaaacaatagaaaggacttgaaaaatatgtttaagaagaataagaaacagacagaaactctcaaagaaccaaaagaaaaaaaggtgcgtactgttaaggtaggcacacataagaaaaccgtgattgcgttgtgggtggtgcttatcgcaagcgtgagctttggagtgtataagaattttacggctatcgaccagcacacgacccatgaaaaagaaatcattgaacttcgcttgcaggacaccaacgggatagaaaatttcgtgaaaaactttgcgaagtcctattacacatggaataacagcaaagaagcgattgaagcaaggacgcaggcaatcaacggttatctgacaaaggaattgcaagacttgaatatagataccattagaaccgatataccgaccagctccacagttacagatgtgattgtatggagtattgaacagtcgggaacggacactttttctgctacctacgaagtagatcagcagataaaagagggagaacagacaagcaatgtgaaagcaacctataccgtaaaagtccatgtggacgctgacggggatatggtaatcgttcagaaccctacccttgcaccagcaatcgaaaaatcagactatgagcctaagacaccagaagcagacgcaagtgtagacgctgatactgtcaatgacgctaccgcttttctggaaacattctttaagttctatccaacagccacagaaaaagagcttgcctattatgtatttggaaatgtgattgaacctatcggcagggactacctttattcagaattggtaaaccctatctttacaaaggacggggacaatgtgaaagtcaaggttgccgtgaaattccttgataatcagacaaaggctacgcaggtatcgcaatatgagcttgtactacataaggatagcaactggaagattgtaggataaattatatagcgtgcatttcctaaatgagatttgcacgctgtatttttgacaagtaaactatgcaaaataattgacaacaaaacttggctatgatatgttataagtgtcaataaaacttggcagaaagagagggtgttttatgaacagagaagaagttttaaaaaaagtacagaatagaaagcctaatcaaatggacgaaatggaattggatattttacaaaaaagtagcactattggaatgacagtaggattgattatgtgtgtcgttttaatgattataaacatatattgtaatcaaccatatcaagatgtatattccgtattttgttctatattatgcggtcaatatatgtataaatggatacgccaaaaggataaatttacattgttttgcggaatatgttggggctttgtagctgtattattatttattttatatcttataaaaatatttgtataatgattgcaaggtacttcttatgaatgatgaattgatattgaaaaataatttaaagcaagtaagaacagaaaaaaaactatcacaatcagctttagcggaaatggttggggtatctaggaatacgattagttccattgaaacgggacaattcaatcctactgctaaacttgcacttattttgtgtattgcacttgataaaaaatttgaggaactattttatttttaggagtgataccatgttaggacttaaaaaacgtgacataaaaaaagcattgaaagctggtgcaaaagctggcggtgtatcattggctgatgttcgggcggatattgaagtaacgattgatgaagctatgaacagtaacgacccagaagtgcaggcaaattttaaaaagtattttggaaataaacgccctacgccagaagaatatatttacaagattacaaaaaagacaaaagtataatacaaaacaaatgctttaagggggattgtattatggaacattttaagcgaaattctatacaatcatacactacctaacagcattttactaaaaactaaatattttatagctctaatagctcgtataaaactatatgttttgtgcgggcttttttcatgcctaaaaaaatttttaaaattttttcggtttcaacttaacaaatcacacctgccgttccctatatggtgtggaaagagggataactacttttcacgtcgtaacggaaagggggtgagattgatgaaaccgtctgacttccagaaaacagttcaatgccgttttgaaagttgtttgaagaaagttgtccgacatgttgttaaggactatcagaagaaattaaaacgacgacaaaaggaagaaacactcttttgtgaacttccagaaatcgttgtagaaaatctggctgtctgggacgactatgatacggactatacgattttcaacgtatgcggtaatgatattcgtgtctatgatgatgaattggcagaagccttgaaacagttgtccgagcgtaaccgtgaaactttgctgatgtattacttcttggaaatgaacaacgaagaaattgcaaaaaagcagaatatttccagaagcggtgtattccaaaatcggcataactcattggcacttatgaaaaaattactaaaggagaaacagtaaaaatgaaacaaacatttaaaaagccgtcttactacttgctttcgcaggcaatggacggggacgaaaaagcgattgaaaagatactggcattttatgacccgtacatatcaaagtgctgtctgcgtccactctatgatgaatacggcaatgtctatattgtcgtagatatggagttaaaaggacttatccgagaagcacttatcaaaatgattttagggtttgatattgctttagaaatcgaagaagaataacaagcagtaaccgcagagcatgatttgttcaaccccctctctcctgctctgcccctgcttttatatgaaagcaacacgctttcgccacagctctttgacaactgaataaagcagacagatacgtttgtgagatagcgagccacggggactgtacgccacgaccttttcaaaagaaagcgagcgacccacgcagtgatccgagagcgactgttggaaaagtcgttttgccacgacctattctcacagaataatgatacgtccgcatggtgcggttctgcccacaagaatgggaatagttgagatactaacggagctttccaaagccgtctgcctgcttataattgatagtttcagcaacaaaatctatctactctttttatttaggtgtgttataatgaccttattagacgagtgtgttttgttgctgtcacaaatgaaaggggtcttaatagtgataagtgatacacaaaatgcacaatctcctacaaaggaaaaaaagacttatacagtagaggaaattgctgaacaactggacattagcaaaaaggtagcttattcattggtaaaaagcggtcaattcagttatgttcgtgctggtaaagccatacgggtatcaaaggtttctttcgataaatggttaaatggaatttaactataaggagagaaaattatggcttcaatcaaacaaagaaaatcaagtttttcagttatttattggtacttagatagtgcaggagaaagaaaacaaaaatgggacacgctggaaacaagaaaagaagcaaaacagcgaaaagcctttatagaatactatcaagagaaatttggatatgtgatagttccattagaggaacaatttgcacatcagattgaaaattctaaaaaagagttagatgttgtagacaaagatattacattgcgtgatttcctagaaatttttgttaatctatacggcacatctaaatggtcgccgagtacatttagtggtaaggtaggcagtattgaaaattatatcaatccgattatcggagattggaaactgaatgaaataactacaaaaagcctatcaaaatactacaatgatttattgagcgttccagaagtaccacgggcaaacagaaaagcaactggtcgttgtgttcaaccagcgaacatcaagaaaatacatgatattatccgctgtgccttaaatcaagctatccgctgggagtatattgatacaaacaaaagaaaccctgcgtctttggctacgttaccaaaaattccaaagactaggcgaaaagtgtggagtgttcaaacatttcgagaagcggtaaaagccacggaagatgatttgctttcaatttgtatgcacttagctttttcctgctctatgcgaattggagaaattacaggacttacatgggaagatgttattattgatgaagagtccattgctacaaataatgcaaaggtaatcatcaataaagaactttcaagagtaaatgcagaagctatgcagaaattaaaggaaaaggatattttaaagattttcccaacgcaaaaaccgcattgtaccacaaggcttgtcttgaaaacgccaaaaacagaaacaagtaatcgtgttgtctggttacctaaaacagttgcggaactattggtgcaatataaaaaagaccagcaggaattaaaggaatttttaggaagtgcctacaatgattacaaccttgttattgcgttagataatggcaatcccgtggaaagccgtattgttagagataggtttcaaaagctctgtgaagaaaatgattatgaagttgtggtatttcacagcctacgccatttaagtacgggttataaactcaaaatgacaaacggagatgttaagtccgtacaaggcgatactggtcacgcagaagcagaaatggttacagatgtctattcagaaatcattgacgaggacagacgtttcaatgcacaaaaaatggataaagaattttattctacgcttaatgatgatacagacaatccaaagcaagataccgacttaaccgatagtgatatggcattattggaactgattaaatctttatcgccagaaatgaaagagcaatttttaaagcaggcactacaaagatagaatttcaaaagtgttagcaaatttcaaaaaaaccagcgatttttcttcaaaaataaaaaagtgttagcaagcctatttccttaaaagtcttaaaaaatatcgaatgaaaaatgattgattgaaaacaaatcgtattcagcgtaaatagaaagccataaataagaaaacgctgaaaaccttgtaaaataaggctttcagcggagtttgtggcgtcccagacaggagtcgaacctgcgacgtttcgcttaggaggcgaaccctctatcctgctgaggtactgggacattcttaaaaatctattcaattttatctagttatcatatcaaaaggcgtttgttccacctagcccttaggaggacctcgttatatccatttaactaagggaacaattgtatctgtattccagacacagttaatatcttatcatagaacctacaaattctcaaccgtttttcatctatttggaaatgaaccgtgttgatggaaatacgaggagagaaacttgatgcaatcgggatatcgtctgaacaggtagacaagaaatatgtagattcaatgactgtatcatatggatatgtgttcagttcagaagagaaatggaacagcgtgtatgatattgcgaaagctgcagacaaaagaatgtataagagcaaagctaatttttatcgtgaaaaagaaagggatagaagaaaataaagccggtgcaggattcatttcctgtatcggctttactgctcctatcaagactccctatgtttctcaatataatacggaacgcaggttgtgaagaaatcaagaatcgtatctgcataagaactatcatcttctgggattgcatgaagtacttgctgaatcgcaaatccatcaagtgtagccataaagatagaagcgaattgttctgcaagcttacgatcatcaagtgcaaatgcagaagcaaaaagcgtagcagcctgatccaggatcgacttcaatccggaggtatatttctgggaaaattctgaatcacatttcatcgcatctgataatagaagtaagtatagcttttcttcctgaaggcgtttgaaacgaatccgagcttctttttctacattagaaaagagagaatctacggtgattttctcgttttcattttcatgaaaaatacgatgtgcgaaatgaatcgaatctgtgacgatttcgtcaaataaatcctgtttgttcttataataataataaatcgcgccggttgtcatattggcttcggcagcaatcgaacgcatacttgtcttatcaattccgaacttttcaatctgtcggattgcagcttgtttgatctgtgttttggttgtgtttttttgttcattcatgttatttacacctcgaaatgaatttgtgttattactcacaaaatctgcattatccgtgtctcttggcagtgtggttgacacgggagtgaacagtaacatgattatagcataaaaaaagataaatgtaacatcgatatttgtttgacaaagcacataacaaatgttatgttggtcttataggaaattattataatttatgaaaagatttatgaaaaaggagagggaatatgacagacaaatttaaaggctggtatccggactatattgagaacgaaaaagaacgtgaaccaatcttaaaacttgccaagatgatgacagggcgtgcaaagaaaaagctcggattagagaagatgacaaagtacgatccggagtattggggactggcacttttgtgtacagatgagcaggctgagatcgcattgaagatgggggtgcgccagccgaaaactttagatcagatggtgaaggtgactggtaaggacagaggttatctggagaagcagttagaggaaatggcagaggttgcgctggtggagtataactgggaaaatccacagcatgagaagcagtatgtactgccgatcttcgtacctggaagtgcagagttctcttgtatgaatgcgaagatgttagagaagcatccggagcttggacttttctttgagagaatgagtcgtattgcactggaaggacttgcaccatttatgccggaaggcggtgttggaatgcatgttattccggtagagaaggcaatttcaacagagaatcagtctctgccaatcgagcacatttcacattggcttgaaaagtatgagggaaaatatgcagcgagtccatgttcttgtagaagatctcgtaaaacattcgatgagggatgtgcggatgatccggaagaatggtgtattgcggtgggcgatatggcagattatatcgttgagacaaataaaggtggacactatattacaaaggaacgtgcgttagagattctgaaacaggcagaggacaatggtttcgtacatcagattacaaatattgacggtgagaataagattttcgccatctgtaactgtaatgtaaatgtctgttatgcgcttcgtacttcacagttatttaatacgccaaacatggacagatctgcatatgttgcaaaggtagagacggagaactgtgtggcttgtggacgttgtgtagagtattgcccggcaggtgctgttaagcttggtcagaagctttgtaagaaggatggttctcaggtagagtatccgaagcatgttcttcctacagagaagaaatggggaccggagatgtgggacgaagactatcgtgataagaaccgcatcaactgttatgatacaggtacagctccgtgtaagacagcctgtccggcacatatcgctgttcagggttatattaagatggcagcgcagggaagatacagagatgcccttgcactgatcaagaagaacaacccactcccggcagtctgcggacatatctgtaaccgtcgctgtgaggacgcatgtacacgtggaacaatcgatcaggcaattgcaatcgatgaagttaagaagtttattgcagctcaggatctgaatgctgagacacgttttattccggagaaagtagttccggcaacaaaaggatatttcgatgagaagattgcgatcatcggtggtggaccggcaggtttatcctgtgcattctatcttgctgaaaaaggatataagccgactattttcgagaaaaatgagcgtgccggcggtatgctcgtatacggaatcccatcattcaaattagagaaggatgtcgtacaggcagagatcgatattatcaaagagatgggtgtagagatcaagacaggtgtggaagttggaaaagacatcacattagatgaacttcgtgcacagggatacaaagcattttacattgcaatcggatgtcagggcggacgtcttccgggaatcccgaatgatacagcaaagggatgtgcatctgcggttgatctcttgaaagaggtgaatgcaaatgagaaatacgacatcaagggtgacgtagttgtcatcggtggtggtaacgtagcaatcgacgtagcaagagactctaagagatgtgcaagtgacgatacaaaggtaaatatgttctgtctggagtccagagagacaatgccggcttccgtagaagagatagaagaagctgagtcagaaggaatcgttgtaaatccgggctggggaccgaaggaagttctcgtagacgagaatggtgaggtccgcggtgttgtattaaagaaatgtctttctgtatttgatgcagaaggaagattcaatccgacatatgatgagagtgagcttatgacagtagaatgtaagcatgtattcttctctgttggtcagtcaattgtatggggtgatctgttaaagggaagcaaggtagaacttggacgcggcaatggagcagttgcagatgagcttacttaccagacagcagaaccggatattttcgttggtggagacgtttatacaggaccgaagtttgcaatcgatgcgatcgcagcaggaaagcagggagcaatctcaatccatcgttttgtacagccacagtccagtcttacaatcggacgtaacagaaatgatttcatcgaattagataagaatgacatcaaagtggagaattatgataattccagccgtcagattccaggacataacgatgcgattgatacaaaatattccttccgtgatgcgaagcttttatttacagaagagcaggtgaaagcggagacagcgcgctgtcttggatgtggagcatctgttgttgatccgaataaatgtatcggctgcggactttgtacaacaaaatgtgaatttgatgcaatcaagttacatagagaacttccggaatgtagcagaatggttccttacgaggatcgtctgaaatttgttcttccgaacatggtaaaacagtccatcaaactaaaatttaagaagaaataaatttgaaagaaattaaagtaactgttcagagccaacctccaaaatgctacgcatttcgtcggtgtggcgtatccgccaaataaaatttcaaaaacagtcttaaaaatgcaagcattttacacctgttttatgaaattttgcttggttctgaacagttacaaattaaaatctaagaaaaattttaaaaggaaacaagggggaaaagtaaatgggaatactttataatgtacctgatttaaaaacctggggaattatgttctttatcctcgtagttctgatcgcactgaatgaattaggacgtgaaacaaaatggggcggaatcttactgtttgtgattgttccggttgtgctgacaatctttgtatggccgacaacctgtgcgccgggaaatgagtacggaaccggaaactggttcaactgggcaaagacttactctgcacttgcaggctgtgttggtttcatgctgatgcgttatattccgaatgcgacaaagcataaatgggtgatctgcttcccgccactgattcttgcaatcaatatttgtgaggcggttttccgtgatttcgaggcatacagcttccatgcatttgcaggcgagaagataaacaatctctgggttatgtcaggaccgtggaatatcatgaacggaatcgcaggtattttaaacatcctgctgatctgcgggtggacaggtatctacatttctaaagagaagagtaaagatatgatgtggccggatatggactggatctatatcctcggatatgacctctggaactttgcatatacatataactgtatttcagaccattctgtatactgtggtgtgattctgctgttatcctgtactatccctgcattctttatcaagaagggatgctggttacagcatagagcacacacactggcactttggattatgtttatcatgacagttccacagtttgcagacagactggcgcctgttccgacaacacataatccgaaggcattctttgctgtaagctttctttctttagttgtgaatgcggcagcagttatttaccagttcagcgtaatccgcaagaataagttgaatccgtttaaggatgagatttatacagacaaagcattttacaagaaaataaatgcagagaataaataaaatccgtgctggaaaaatctaagacagtgaatcgatgagaacaagattcactgtcttcttttttgaattttcattccacataaagaagaaaatatgatagactaaatgtgtataggttcattcatttaccaatggaaatctgataggatggaaatatgaaaacgagggggcgagaagcatatcttatggggaaatgtcttaaaaaatcaagaaaaacatttaatatatgatatatttgcagattttggctacttttcatttggatttggcaagaaatgcatcttcttttcgcctataatgcaattgtaaacgaaaaggaggtgtttagagatgatgaagagaattaaaagatggctgcatgagatttatgaagaagatatcaagttcttcggacagatgaacggaatgtattttcgataagcactagaaaaagaaaataaaagaaaaaaggagaaagaaaattatgagaaaattagcaaaatggtttgaagaagcacttgaaagttatgtaaaattaatgggtaatacttacggatggggcggaagattgtaagccatggaatatacagaaaaatcaaatcaaataaacaataaaaaataagggtagatgtcttgagagaagatatctactcttattttttatatatagaaattcttcacaaatgtgattctatccgtaaatgattgttttattttctcaaaaagtatatacttgtttcatatatattttacgttattttgagaaaggagcaccttttaaatggactctatattatacgaaaactatctgaatattctaaggcaggaactggtacctgctcttggatgtacagaaccgatcgcaattgcctatacagcggcaaaagcacgtcagattcttggagaatttccagattctgtagaaatggaacttagtggaaatattatcaagaatgttaagggcgttacagttccgaattccggaggaatgaaaggaatggaagtggcagcagttcttggtatcgtagggggaaatgcggataaggcactggaagtgttaagtgaagtgacttgtgaagatattgcgaaaacgaaagaactgatcaatcagaaaatctgttcctgttctttagttgaaggagttgataacctctatattacagctaaagtaagaaaaggagagcattttgcttctgtaacaatcgaacatcagcacacgaatattacaagaattgaaaaggatggtgaagtgctgttggataatccttataaatcagaggttaagactaccgtagataaatcgaaacttacggttaaagatatccttgattttgcggatcaggttcgtatggaagatgtgcagccgatcattgatcgacagattaaactgaattctgcgattgctcaggaaggacttgataataactatggagcgcagattggtaaaacactgatgcatgtatggggaaagagtgttactacgagagcctgtgcaagggcagcagccggaagtgatgcgcgtatgggcggatgttctatgccggttgttatcaattcaggaagtggtaatcaaggcatgacggtgtcgcttccggttattgtgtttgcagatgaatgggaagtatctcatgagaagctttgccgttctcttgttgtcagcaatctgattgcgatccatcagaaatattatattggaagtctttcggcgtactgtggtgcagtcagtgctgcctgtggcgccggtgcaggtattacctatatgtatggtggaacctatcaacaggtttccctgacaatcattaatacacttggaaatatcggaggaatcgtttgcgatggagcgaaaccttcctgcgcagcgaagatagcgacatctgttgatgctgcacttatggcttttcagcttagtattcagaacaaaagtttcctgccgggagaaggtatcatcaaagatgatattgaagaaacaattaagagcatgggatacattggaagagttggtatgcgtgccacggatacagagattctgaatgtaatgatagaccgtgcggatatcaatgaggagtgctagaaatgaataattttatctatgaaacaccaacaaaagtatatttcggaaaagacgaggaattaaaggtcggcaagatcattgcagagtttcatccaaagaaagtcctggtacatttcggtggaaattcagcaagaaagagtggactgcttgataaggtggagaattgtctgagggaagaaaacatcagttttgtagagcttggcggagtagttgcgaatccggaacttccgcttgtaagagaagggattgagcttggaaaaaaagaaggtgtagattttgttcttgcagtaggtggaggttctgttttggactcatctaaggcgattgcgaatggactggcgaatccggaagtagatgtctgggattttcattgtggtaaagctgttccacagaagacacttccgaagggagcgattctgacactggcggcagcaggttcagagatgagttcttcctgtgtaatcagtaatccaaagacaggagagaaacgaggatgtaacggactctttaaccgtatgaactttgcaattgaggatccggttcttacttatacagtaagtccttatcagaccgcatgcggtgcagtagatattgcaatgcatacgattgaaagatatttctgtccgggggaggatacctatctgacagattcgattgcagaggctgtgatcaagagtgtacgaaaagctgcaggagattgtctgaagaatccggaagattatactgcacgagcaaatatgatgtgggcatcttcacttgcacataatggactcacacagtgtggaagagagttccagctcgttgttcatcagttagagcatgaagtatccggaatgtacccggaagtagcgcatggagcaggacttgcagcgctgtggtgcagttgggcaagatatgtttacaaagcaaatataaatcgctggctgcagtatgcatctaatgtatgggggatggatattgattttgaacatccggagaagacgattgaaactgcaattgatatgcaggagcagtattatgcatcaattggaatgccaatcggattaaaagaacttggtgtaaaagaagatgatcttgcgaaactggcacttgactgctcaaggaacaaaacccgttcattgattggatataagccattggcatatgaggatattctggtaatttatcagatggcatatgagagaggttaatatcgaaagagctgcttaatgcggctgctttcgatactctcttggtgacatatggtatcgttcctggaatacgcggttgaatgttctctgactgtcgaatcctgcccggatgcagatgtcgagaatcgtatggtcgctgtgaagcaggagattacaggcgtaatccaatcttgcttcattcagataccggttaaaattcgtatgaaatgtgccggagaagacacgtgataaagaggactgactgattccaaggtcatgagccattttggaaagcgtcagttcttctgtataatgtgcagcaatataagaaacagtctggtaaataatgtcattacttccaacactgctcttatctatcatttcaaataagggaagagtgcgtgcaagtataatctgaataaatgcctgatgcagaacatgcccttgtgaagcggctggatagaccagcatgcttcgcagggcataatttacgtctgggtgtacttcttgagccagaattaccggatttacaggacaaaattgctgtaattctttcgtataactaggagcaagaagcggtgaagcaagtgcataaatcgccttacaggattcactgttgaatacctgatagtggtggatcaattccggaaatacaagtgcaaaatcgcctttttccatatgatacaattcagttccgactccgatttccagtgtaccttctgttacggatacaagttccattgatttgtgaagatgtgggggaatatggcaagaaatctgttcagcgatttccagtgtttcttcattttcttcgtaaatcggtttcattttttcctgcctccgggttaattgtttagaatagttgatctaatagtatcatcatgcgtgtatatgacatgcttcacaggcggatggcgttgtagcacatccgcttaatgctgtctcgcgtagttcaacgggaagtcgttttccgactttgtacattgcctcgagcatttcatcaaaaggaatgagctgtggaatgccggcaagggacatttcagctgcaatcagtgcgttggcaaccccggctgcgttacggttctgacaagggtattctaccagccccccgaccggatcacagacgagtccaagcatgttcataaggactgttgaggcggcatccagacattgcttaggagttccacccataagttcaacagcggcagacgctgccatagcagatgcaacaccgacctcagcctgacaccctccgacagcaccggcaacagtggcatttcgcatggcgaggtaaccgacagcgcccgcattgaagagaacctgctgaatctctttgtcggagaaatggtatacttcctgaaaagcgagaagcaatcccggaacgatgcctgcggaaccggcggtaggtgaagcaacgatcagtcccatggacgcatttgtctcaagggttgccatagcataagtgatagctttctcaagcagttcaccgcacagtccctgaccactggcagaatgctgggcaagtttttgtgcctctccgccgatcagcccgcccatggaacggattggtttttcaatcggagagcgggcagcttctttcatgatttcaagaacacgcgccattttttgatccgcttctttagcaggacattctccggttatgatctctcgattacgcataacttcagagatagaaatattctgttccttacatagtgtaaggagttcgtttgcatttttaaaatccatataaaaaacctccttgaacacaatcacatctgtacgaccataacatccagaacatgttcgttctggcggatggtgtcggcaatttcttccggaagttttccgtcggattctacaatcgtgtaagcagtgtgtcctttcgattcacgaaacagacgcataaaagcaatattgacccggcggtcgctgagacagctggtgatccaggcaacaacacccggaacatccttctggacaacaatgatagcactgtattcaccggtgaaatctacttctacatgattgatctgtgtgatgtggactttaccgccgccaagagattctccacggatcgtcatctcctgaccggcagtattggtcataataatatcgacggtattcggatgaatatcagtttcttcctcattcggagtaaaagagtatttcagtccgttttctgtagcaatctcgaaggaattccggattcgcatatcatcagtggaaaatcccatgattcctccaagaagtgcgcggtcagtaccgtgtccgtgatacgttctggcgaaagagccgtagagaataaattctacttttgcaagcggtccgttgatcatcttctgtgcaagataagcaatgcgtgccgcaccggcagtgtgagaactggaaggaccgatcatattcggccccataacatcaaaaacgctgataaaagacatttctaaatagcctcctgagtttgtatatatgagtttagtatagcaagtgcgacggtggatgtaaactatgagaaacacgatccgcgtaaatgctgttaggggcagttactgcaaaccgtaactgcccctaagtatgatacttatgcgaattagttctgatcaagtacggactggatctgcttcatcagctgatcgtagtttgactgatcatcgatgccacccatgaaaggttccccaacgatatttccgtctttatctacaagaacggttgtagggaatgccatgatgtttccggcatattttccaactgttgaattagaatcgaaagtcaggttcttgtaagaagcgccctgtgctttcaggatttcttttgcttctttgattccagcctcattgttgtctaaagtgtcagtgttgatacctacaacttcaccgcccatttctttgagcttctcatttaattcattcagtttggaaagctctccgacgcacggcttgcatccactgaaccagaagtttacaactgtaactttgtttttagcaaaaaggctgtcgtctacatcattgccgtccagatcttttcctttgaaacctttgaatacacctgtggactcatctgatttagaggaagcgttgtcggaggattcggatgcagcgctctctttctcgagttttgcaatctcttcttcgataccgcgaattgtttcaatgtctttgctcaaagtttcatattcttcttcagagaaagagtctttattagattcaactgtacttgcaagaacgtcagcatagttttcgttcttggcatcaccggcagtgttcttgctcataagaccaaaggctttgtcccatgcatctttgtgatcagcaaaaagctggttttcctgctggtaaaggtcgtccagttttttgttcagctcatcagtgctgcctgtttctgttgtggaagaagattcctgttttgtattggttgttgaggaagaatttccgcagcctgtaaatgcaaaaagtacagaaatggcaagggatgcagcgattaccttttttaatttcattgcgtttgttctaagtgttttgtttttcatgattttaaatctcctttaaattacgttttattagtttttattttcagcctgtttcttagttgaaaatccgtaatgatagcagattgcatcagtcggacaggctttcatacattctccgcagcggatacactccggatggtttggtgtgtctactacattgacatccatcttacagacacgactacatttctggcagccaacacatttctcatgatcaacctgaatcttaagaaaagataccttgttaaacagtgagtaaatagcacccagcgggcagatccatttacaaaatggacggtaaaacaagatgctcaggatgatgaaaagcgcaaggactgtgaacttaaatgtaaataaatgtccaagcgcggaacggattcctgagttggcaagtgccagtgggattgcgccttcaagtactccctgcgggcaaatgtatttacagaagaaaggatctcccataccaagtgaattggttacaaatgccggaagcagtataacaaagacaaccagaatcacatatttcagataccgcagaggcttcagctttgcggtggaaaatttcttgcccggaatcttatgcagcagatcctggaaccatccaaacggacagagaaatccgcagataaatcgtcctaacagaacacctaacaggatgaaaaatccagtgatgtagtaagtgaacttaaatttggaggatcctattacagcctgaaatgctccgatcggacaggcgcctgtggcggcaggacaagagtaacagtttagtcccgggacgcacatcgtctttacatttccctgataaattttccctttgaatagattcgggatgtgaatgttggtcagcagcgttgcagccgcctggatccatccgcggaagcggaccagagggtttttgtttgatttcattttcttatccaattccgacacactccatacataattttattgccttgctaagcacaaccgcagcttctccgcggaagattccgacaaggaaaaataccagaccggctgcaagtaaaagaatctgtgttgctttttcagatttcatttagatactcctttcaatgttcaaagtccgtttgttgttactgttcactcccgtgtcaatcactccgctgattgacacggaggatgcatgttttggcttgaatacatctcgctccatcgccaaaggcgatttaaaatggcgagatgcgttgctggtcgcacatcgtgtgaacagtaaccgtttattgacctttcgatgtttgcattatacaatagggggtgtaaaattcctgttaagaaaatggagaaaaataaattgagattattagttgttgaagatgagaagaaattatgtgatatgattgcgaaaagtctgcaccaggcagggtatgaggtagacacgtgtaatgacggagaggaagcactggatatgatctatgcggaaatgtatgatttgatcgtgcttgatcttaaccttccggggatggatgggatggatattctccgggaacttcgaaaggaaaatgaagagacaaaggtattgattctgtctgcgagaagtcagatcgctgataaggttgacggtcttgatgcgggggcaaatgattatatggaaaaaccctttcatctgcaagagctggaagcccgtgtgcgaagtctgacaagaagaaagtttgtacagaaaaatgtctgtctggaatgtggcagtcttcgttttgatacaagagaaaggactgcatatgcaaaagacaagccggttgcattgacaagaaaagagaatggaattctagagtatcttcttttgaatcagggaagaccggtcagtcaggaagaactgatcgagcatgtatgggattcttctgtggatagtttcagcggctcgatccgagtgcatatgtcttctctgagaaagaaactgaaagcaggacttggttatgatccgatcgtgaataagatcggtgaggggtataagataggaggaggtaaagcatgaaaaaaatatcactccagtggagactgacgattcttacgacggtgttgattaccgtattgtgtggatgccttacatttttcctatataagaacggagtctattatattgatacgcttcaggagactgttacggatcaaagtgccgcaccggaggcagtgtatattgatattccggataatgaatgggatgattttgcagcgcagtttgctacgaaggtttataattcgaaatcagattatagaaatagaagtcttctgattactgctgtcgtggcactgatcggtggtgcagttacattttttgtcagcggcagggcattaaaaccactcaaagaattttcagagacagtagaaaaggttcaggcacagaatctggcggattatacgattgaagagaatagaatcgcagaattagaccgacttcgtacttcttataacaagatgcttttgcgactttcggaatcatttgagacacagcgtcagtttacaggaaatgcagcacatgagctacgaactcctttagcattaatccaagcacaactagatctttatcatacaacagaacatccggagagtggagatgtggcagaagaaaccatccagatggtgacggagcagaatgaacgtcttagcaagcttgtcagaacactcttggatatgagtgaattacaaacggtggcacgtaatgaaaagatcgagattcagggattgatagaggaagtgctgacggatctggaaccactggcacaggaaaagaatattgaactgttacagaaggcacagaattcgtcggatggaagatcagatggaacagaagagccgttgctggtctcatgtagtgtgaacagtaacgaaaagccagaggatgaattgatattgacaggaagtgatattctgatttatcggatgatttataatctcgttgaaaatgcaattaaatataatcgggtagatggaaccgttacagtatcggcgaagagagagaagaatgaagttgtcctgacagttgcggatactgggaatggaattgatgagacatttcgagagcagatttttgaaccatttttccggctagataagtcaagaagtcgtgagcttggcggtgtgggacttggacttgcgttagtgcgtgaaattgtgcgggtgcatgatgggaagattgaggttcgcggaaatgagcagggtggaacgacatttgaagtgagaatgaggatggaatagaaaaataaaaatagaaccgtcatcgtatcaagagcagcttccatcattttgatccattattatccgtcaggaaatccaacggccagtgcagaggatctggaagcaacgagaagagtggctatcgcaggagtcctgatgaacataagtctattggatcacatcatcataggtgcggatggaagatagtgctgaatttatcatcactctgattcgtataagtaatattttggtcaccgtctaacatgaaaaaatatgccttttcatcatatcctttaaggtttaacattgaatctaatttcgcattgtcatacacagctccaatttcatactaaatacacactccgtttctaactcaagtccatccattgcctgttgaaatccgagcctaataccgcctaaaccaacgaataaattattcgtggcatgagtaatcctccttcgttttggttccactaaactatgagatgggagagccccctttttcaaggaaactaattttgtgactatttcacaattgaaatgtaaacgttttcccgtatgataaatgtatagaattcttccggaggaattttaaatatggaaaatatagacattaaatttatcgcgaaaaaaagcgagtgttcgattgctacggtttctcgtgtgatcaatcgttccaaaccagtcagcgaggagttacagaaaagagtaatagatacgatcagaaagtacaattataatccaagcatttacgcgcagaatctggcgggtaaaaagtcaagactacttggttttataatgacaaactacatcaatcaatatcagctgctactgtttcgttatctgaatgagtttgcatgcaagatggggtatggttgtattattcgttattgtaattctggatttgaggaaaaactagaggtactaagagaactggaaatcaggggaatcgaagtctgctttagcctttttctgctttcgcaggaagaggaagcgtacataaaagaacatttcagaattaaagtctgccatatgcagtcaccggaaatgcgcttgaacatcatagaaaaaaacgaaagttctgtttatgaggctgtgtgctatcttgctcagcttggtcacaaacgaattggaggcattttttgtattgacgaaatagatgatagtttcctcatggcaaggaaaagaggctttttaaaagctataagtcagataaatctcgatcaagatgaatctctgatcggccagcttcatggagaatgtgaaaaagacagtgtgatttctgtgatagaaaagatatttgtacctcaaaagccgccaacggcattgttttgttatagcgatgaagttgcgatcgaggtaatgtcctggatcatgaagcagggttatagaattccagaggatatatctgtgctttcatttgacggtattccgtttgcgggacgcgtaacgccatctttgtctacaattagccagccagtagaatatcaggcaaaatgtattataaacggcatgttgtatctacaggatggaatagaaagaccatgtgatgaaaagggaaatgaatatcttctgcagattcgggacagtgtggggcttcctagtcattaaaaagattggaggaaaaatatgaaagcgaaaaaattaattgctactggtattgcgacatcaatgttactgctggcgcttaccggatgcggagcaggtggaaatagtggtaaatccgcaaaagatacagataaaggatcagtatattttctgaactttaaatctgaactttcttctgaatgggaagaagtggccggaacctttaccaaggaaaccggaattgatatgaaagtagttactgcgggaagcggaacctatgaacagacattaaaatctgagctttccaaaaaagaaatgccgacactttttaacgttaacggtccgattggatatcagacatggaaagactattgtgctgatctgaaagattcaaaactttatgaatggcttactgacaaagatatggcaattaccgatggcgatggtgtgtatggtattccgtatgcagtagaaggatatggaatcatttataatgatgctattatgaagaaatattttgcgcttccggataaagcagttgatatttcagatacaaaagagattaaaaatttcgacacgcttaaaacagtggtggaagatatgacaaaacataaagatgatcttggaattcagggagttttcggttcaacttcatttgctcccggcgaagattggcgttggcagactcatcttatgaatatccctgtgtactatgaatacaaggctgacggagtggataatctggatgagatcaaattcacatataataaaaactttaaaaatatttttgatctctatctgaataattcatgtacagaaccgtctatggttggatctaaaaatgtcgaggaatccatggctgaatttgcgactggaaatgtagctatgatccaaaacggaaactggggctgggccatgatctatgacctggatggaaacgtggtaaaaaaggaagatattaagttccttccaatttatacaggagtagaaggcgaagaaaaacagggactttgtgtcggaacagaaaactatatctgtatcaacaataaggtttctgaagctgaccagaaagcatctgagaagttcttggaatggctgtttaacagcgagagtggaaaagcttactgcaatggaatccttggaatgatcccgccattctccacctttgatgaggatgaaagacccgataatccgctcgtacaggatatgcttagttatatgaacgatgattctttatattctattacctgggactttacaaccttcccgagccaggaatttaaaaaccagcttggaagctatctccttgaatatgcgcaaggaaatatgacatgggatgatgtagttaagcagacaactgattgctgggcatcagaaaaagctctgcttgcacaatagtagagtttataggctggcgttttccgaacggaaaatgccgcataatacagtgaatgtagcagatttcgctgctttggaatgcaaagcagcggtaaaatccgttgctgtttgtgcaatgcgtgaaaagcaacaaaatttatggggcagagacaaaaatgtttctgccctgtgtacgaaaagggaggctgtatagaagatggaaaaagcttttaaaaagagatttgtgatattaatgttaccaacgctgatcgcatttattattgcatttattattccatttgtactgggaatttatctttcattcactaaatttacaacagttacagatgcccagtggattgggctgagcaattatattgtggcattccgggataaagatttccttgcatctctcctgtttactgttaaatttgtacttgttaatcttgtgacgattaacttaattgcctttatgctggcatatgtgttgtctagaaagctccgtggaacaaatattttccgaacagttatatttatgccgaaccttctgggcggaattgtgcttggttatatctggcagctaattattaatggatttctttcttttttcaaaacaacgcttactgcagatgcggcatatggattctggggaatggtgcttgctatgaactggcagatgatcggatatatgatggttatttacattgcagctatccagaatatttcagaggaaataaaagaagcagcacttattgatggtgtaacgcgaggacagatgattagaaagattattctgcctctgatcatgcctgcaattacaatctgcttatttatgacaacaacaaatgcatttaaaatgtttgacttaaaccttgctctgaccgcgggacttccgggaaaatcgacttctctggttgcactggatatctataattcattctacaacagaatgggttatgagggagtcggacaggccaaagcagtgatgtttttactgattgttgctacaatttcagtgacgcagcttattattactcggcgtaaggaggttgaaaactaatgaaaaataagaagagtaaaatcatactgatcttaattcttactgtaatctcggttttatttatcgctccgattgtgattgtatttatgaattcgtttaagagcaaactgtttattaacagtacgccgtttgcgtttcctaatgccgactcttttgtagggttggcgaattatggagaaggaatgatcaagaccggatttttgcaggcattttttattactttatttataactgtagcctctgtgtttcttattgttgtcctgacttcaatgacagcatggtatctggtacgtgtaaaaagtcgttttactaaagtaatgtactatctgtttgcttttgctatgatcgtaccattccagatggtaatgtttacgcttgttaaagtatcaaatatgtttcatttggacaatctgattggtatcatatttatttatgtcggatttggtgctggattgtctgtatttatgtttaccggtttcattaaatcaattccagtttctctggaagaggcagcgatgattgatggatgttctattatgcaaatttactttaaaattgtgtttcctgtgatacgcccgatcattatgacagtcgcaattctgaatgccatgtggatctggaacgattatctgcttccatatcttgtaattggttctgaatataaaacaatttctgtggcaatccaatatctcagaggtggatatggatcaattgaccttggacttatgatgtccatgctagtactggcaatcataccaattgtaattttctatatgatctgccagaaatggatcatacagggagtaatcgccggagcagtgaaaggataaggagactagaatgaaaaaagtattatatgaggaattacttccggaagaatgcgtgcagagaatacaggagatgccggttgcttatctcccgcttggcacattggaatggcatggtccacatatgcctcttggggctgacggaatccagtcaaaagagttgtttgtccgagtggcagaaaaagtaggcggcgtagtacttccgatgttgtttatgggacctgatcgtgtgttttatgacagggggaccgcgttttatggaatggatattaataccgaaggcgcactgaatacatattgcgtccagcagatgaaaggcagtgcctattggatggaaaaaggtcagtttcaggacaatctgcgcagtatctttgcccaactgtccagagcaggtatacgtatcgtagtcggacatggacatggtccatcaacaaatgcatttcaggaactaaaggaagaagcagcagaaaaatatggcctgcgcattttgactgcttggacatttgcagatgatgatcggttgaaatatcagaatgaccatgccggagcgaatgaaacatctatcgtaatggctgtacgtccggagttggtagactttggacaggtgaaagaaaatgaaagtaatctgatcggaatcgcaggacgtcatccagtcagagaatcatccgcagcatacggaaatgagatccttgagtatacaatgaaaacacttatttcaggtattgaaaaggagtacaaaatacttaaagaaagctagatgcaaatgagtttgaactgttttatgaaaaaagaatcctgctcgcaggattcttttttcagcatttgttgatttttttacaaattcaattttcttctcgtagcaaagctacgatatctgagtcattatccattgccgatttgtcggtaatttctgttttctccaattcttcaactgaaatttgagattcagtactattgtctattattttcaaatgaaacacttcttttttctcagcagcctacacgtacattctattgtgtttgtcaacccttaaaaaatggttagaccacttattgaaaatctaaccatttaagatacgcaatgctaatcaaatgacattgggctctgaacagttacgcataaaaaaggctgcgcacctatagttcaatattattgtttcatcatccgattccgcccagtactgcgccggcaatcagtgcaacaagtgcgagtggaacaaggacatattttccaagtggcaagaaccaagttccgatttttttctcacgtccagtatttacagctttcagtgcgaattctttatctgcgatccagaagaacatgattgctgcaagcattgctccaagtgggcagatatagatagaaactgcgtccatccatccggagacgatgccctggatgagaagtgcgatacagcagccgaatgctgcaatgattccaacagctgagacacgctttaatccgaaacgttcctgtaatgtagcaaccggagcttcgtatagatttacaagtgagctcattccggcaaaaagtacgcagatgtagaagatgatgcctacaatcttgccgccgggcattccgttgaatacattgaccagatagataaacatcagtcccgggccgccggaagataattcagcaccgccgactgccattcccggaatgatcacgaaagcagcgagtaaggcagcgattgtatcgaagatggcaacattttttgcagaacttaccaggtcttcagaatcctttaagtaggaaccataaataacagttccatttccggcaatggacagagagaagaatgcctgcccaaaagtatagatccaaagtcttggatctaaaagtccctttggattgatcgtgaagatgtaacgatatccggtcgatgaaccaggaagggagaaaatatataccccgagtccaagaaacagtacgaacaataacggcatcattacgccgttggcacgctcgattccaccggaaatccccattgccatgatcacagcagttacaaggactgcaattacaagccaaaggttattaccaaaagcagaagcagtactgtcgaacatgcctccaatttgattcatatcttgtttcatgccggcaatctgtccgatcagcgcaaggaaagtgtatttgaaaatccatccgacaacaacagtgtatccgattgcaagtgcgagggagccgagaaccggaagcagtccgatcaattcacctgttttcttattgccagttcgcatttctgtacagacaccgaaggctttgattggtccacctttggcagcgcgtccgagcgccatctcttcgatcactccggtagaagcaatcaatattacaaataaaatataaggaatcagaaaagtcataccaccccagtctgataccatgtaaggaaatcgccagatattccccataccgacggcagatccgatgcaggcaaggataaatcctgtccggcttttgaatccgtcacgttctttctcatgttttcccatgtgtagtcctcctgtaaaagtgcgtatacttttgtacacgaacgtattgatgtattatagcatatttacataaagaaaagaagcaccgagatgatgcttcttttgatgtgtgcgcctagcggcgcacattacgaattatgcaatatgacagaaagaagagtccatccctttttcaagcaatccactttcagtaattgttttataaacagcatctgcaagtgctgcatgaccggattcatccagatgctcccggtcaatttcacttggaagagcgatttttgaagcgtccagaaaaccggcgtgataatgagtggcaactttccgatattcctgtgcaagctgtctggaaacctgttcagacgcaagatcgaattcagaatcaaagccgtcatctccgactccattgccaagatggatcggagagatgatcaagagttcaaagggctgagaactatatttcttcgctttttcaataacctgaatcaatcctttggcaatcgttttggaagaagcgttaaagcgcgttttacagtcatttgttcctaacatgagaaccagaagatctataggattgtgagtctctattgtgattccaatctggtctaatccgcggcggccttcgcgaaaagcgtccgaaaaaatagttgtgcggccgcacaatccttcttcgataatgcgatgtccgttgctgaattttttctgaagcaggcaggtccatcttgttttttcatcaaagcgtccggttccatccgggcggtatccgtaagtattcgaatctccaaagcataagatattcataagcaaattcctcactcaaacaaaataacatattaaacaagtatgaaaagtatgataaagtatttcaatgagaaagtcaatagaaaaacccaataaacatataaaaatagtaggaaaatagaagacgataggggaatgctcgggttattgtttgttgctggtcgcacaccgtgtgaacagtaactattgttcatcgatgagatgtcacaggcaggaagtaagcattgtttttgagaaaataattttgtataatgaagtgcaaagctggttacgataagagatagtagcaagaatgtcgaggcattcttgaatatacgacttgggaagtgaaagacaaactatgaaatgtaaatggataaagaagttaacagcaggaattatatttcttgcggcagttggaagtctgagtggctgtcagaaagcagcgacaccggagaatctgttccgcgatattgaggttaatatgacatcagtagaatcggcagaagagaatcagatcgtaaaactgcagatgggtgatggcgacagtgcaatcagccaggagagcaatctggatatcgagatgacacgagatccggcagcagtacacagaaaaggtcagcagaagacgaatatggccggaacgaaagagacacaggagatggaatcttatcaggtggaagaagacgggaagactgtgatctacagtggaacggatgaagcctgggagaagaacgctgttgaggagaaagagacatcttcacagcagacggtattgttcgatggacttcagaatctgtccggagcattcagcgtttcacaggatcttgcgaccgtgaataaggaagagtgctttgagctgacaggaacgatcagtggaacacagttccaggagacatttgcagatacgctgaaagctttactcggagaagattcctctgatctgtcaggctggaatctacaggcttccgaggatgaggaaaacaacgaggagcttcagcagaaattgaacaacataaaagtggactgtgtgattgatatttatagaagtaatatacttccggcaaagattacctttgatctgacagattatttgaaggcagcaggagaagagaatgcacaggtgacatcctatacactggaagtgacatttgtgtcctataatgatacaaagaagattaaagtgccaaaggctgtaaaggaatctgcgaaggataacggtgaggacgaagcggagaataatacagatgaaatgctggaagaagagaatcaggaagcagcgggagaagcagaagccgctaagggaatccagtcggatatagaaggtgccgcaccacaaagtgaagaacttggagcaagctggaattcttataccgttcagattaacggtaaaggactgacgcttccgtgtacaatcgcagacctggaaagcactggacttacgctggatgaaaaaagccttccgcaggagtatgagattgaagcaggagattatcagaatgcctggtttaaagatgcttccaagaatacgatcatggtggatctgatcaacacagggaatgatgtaaaagaagcgaaggattgtctggtcggaggaatctatgtggaacagtattcattgagaaacgaagacctggcagtaatattcccgggaggaatccagttaggaacggcaattgatgtcgttcaggcagcatatggagaagcatcccaacatacagaatccgagcttgtaaatgtatataactggtatgaagacggaagtttttataatagttgcgagatcgatacgaacagcacggatggaacagtgagcatgatgggaatcagcaggttcgaagtgaaaaatggtgagtaactgttacattcttgaactgtgatgaaaaaataaaagaaaatttttaaaaacacttgcattccacaaaaacatatgatattatataaaacggtcacgcaagaaagtgatcgttgaggccccgtggtcaagcggttaagacatcgccctttcacggcggtaacacgggttcgattcccgtcggggtcattttacagaaagcattgctggctgtaataaaatttaagatatggcgcagtagccaagcggtaaggcgtgggtctgcaacaccctgattcaccggttcaaatccggtctgcgcctcttagaaagtctggaaatgattgtttccggacttttttctttatgtgaaaataagtatttagatacaacaaaatcccccatgagaagaagtgaaggttctgtcttcccatggggaattttgcgtgcaatattatagggcttatcagttaataaacaaaacttatgaattcgcaagtgctgtctgttttacatccggaattgcaatcaaaatcggataaagtacagcagaaaggatcagtccaccgattccctggaccaggttcgccggaacgcttgcgaatgcaccggctccgtagataaagtactcgcacaggcagtaaccgccggcaacgagaatgatatcagcaacaccgccgaggatgactgctgtgtaacggcttttggaattcttacctactttacggtaaagaagggcggagcaaagggataccagtcctttgatcacaaatgtgatcggaacatagacaaaatatcctccaagcaggtctgccatagcagatccgataccgcctgcgaggaatccccatgcaggtccgagaacaacaccggcaaggataacaatcgcatcacccgggtgaatatatccgcttgttccgggagtaggaatcttgattgacatcgtagcaacacaggcaagcgctgcgaacagtgcagccatgacaagtttctttaatgttactgttgacttagaattcataacaaaaacctctttcctttaagatttatcatactatacaacagaagtggactataaaaaagagccacttttacaaaaataaaccataccagtttaaacgggagacaaatttataaaatcttaagaaatgtagagagtatgctttaagatgttgatgaaataataaaaaaggtttaaactagaaacgtttgtatctgtatggtaactttatagatactttgaaagaaagtatagtttacaacatatgaaaaaggagaacttcaaagatgggatatcattcaattatatatatattcctatttcttccggtttgtctgttggcctatcagcttgcaccggagaaatggagaggaagagtcttgcttgcattcagctggattttcttttatctgttaagtggaaaattgctggtttatcttttggggacaacgcttctgacccattgtattggcatctggctgactttgctcaaaacagaagaagcaaaagccgtggaaggcatggatcggaaacaaaagaaagtaattaaagtagagtatcagaaaaagggaagaagagtattaatactgggaatcctgattttactcggagttcttggttatttaaaatattttgatttctttacgacaaacttgagttatttattcggacatccggttttggaaggatggagaccggaaaagctattaatgccaattggaatttcattttatacattgcaggcaattggttatatgacagatgtgtactggggaaccatccaggcagagacagaaatctggagaaccgcattgtttctcggattcttcccacagatcatggagggaccaatcgcaagatattcagatgtggcagatactttgtatacaggaaagccattggaatatagaaatgtggtcgatggttatgtaagaatcttctggggactctttaaaaagatggtgatagcagaccgtatggcactgatggtaaatcaggtgtttgaccattatgcagactatcatggagcagtgattcttgcggcagcgattggttatgtgattcagctttatatggaattctccggttgtatggatatcattataggaagtggaaagctgtttggtatctgccttccagaaaacttccgacagccgttctgtgcgaagaatccttcggaattctggcgcagatggcatattacactcggcgcgtggttcaaggcatatattttctatccggtatcggtatccggattggttaagaaatggaaccagtatggaagaaagcattgcggaaagcatattacaagactggtgacttctgcaatcgccctgttcccagtgtgggttgcgaacggagtctggcatggcgcacagtggaactatattttctatggaatgtattattttgtattgatcatgcttgggattgctgtggagccggttcgagaccatattttagaagcgtgtcatattgatccggagacgaaaatctggagaacaatccagattgcaaagacatgggtgattattgtagttggagagttatttttccgtgcaaatggattgaaggccggatggtatatgttctgtagtatgataaagaattttgatacaggacaattaacagatgggacactgtatacactcgggctcgagcaggcggattatctggcggtgatagtgggatgcctgatcgtcggaattgtgggttctatgaaagagcgcggaatctctgtacagaagaaaatgggagaactggctgtaccggtgcgctggggattgtattatgccttagttatagggattttgatcttcgcagcgtatggggatggatatcagattcaggatctgatctatgctggtttctgaggtgataagaatgagtaagataaaaagaggaattctctttattgtaatactagcagtatttttggtgacaagttctgtcgggatggaatattatgtggtgcatcagctgaatggagaagtgaccggaagaaaccgcccatttgcggctcttacagttgagccggaagatacattggatctgctggtggccggtgacagcgaaagctataattccgtatcaacaatgcgattgtgggacgataaagggattacaacttatgactgtggacagggagcacagagaattccagagacttattacatgctgaaacatgcatttaagaaacagtctccaaagattgtgatacttgagacaaatacattgttccgtgatattggagcagtaaaaagtacacaggagatattaacgcaggcaggacagtattatctgccggttttccgttatcataatctgtggaagacagtagtagatgagccggaaatgcatacgaattacaaggggtttgtgatcagggatgaggttgatccatatgaaggaaaaccggattatatgaagaaaaagaaaaaatgtgaaacaatgcctgagtatgtaaaggtttatctggagaaaattgaagaactgtgtgaaaagaataatgcgcagttattgcttgtaagtatgccatcaccaaagaactggaatcataaacggcatgcagagatacagaaatatgcggatggaaaaggaatcacatatctggatctgaataagaaggtggaagaattagggctgaactggacagaagatacacaggataagggcgatcatctgaatgtttatggggcagagaaggtgacttcgtatcttggaaattatttagaagagaattatgaactggaagatcatagaaatgatccgacgtatgaagcatggaatcagctggccgaacagtataagcagaaccttgcaagaatacaaggaaaaatagaagtggcaaaagaaacgggtgtgggaaaatgatagcaaaagaagagttgaatattttgtggagcctggagcagacagcggaaaagtatgaagacagggttgctgtttcggatgtaaatcaggagatgacttggaaaggacttgtgaagaaagctcaggtgataggtgcagaattaagtaaaaaagttcaaccgggaaatccgattccggttcttttagagaaaagttcagaaacactggcagtgatgcttggaatcgtttatgcaggatgtttttatgttccggtgaatccgatgaacccggcggaacgtctgcgaaagattatggagaagctggagccggaagtgatcatttctgatgagaagggaaaagagcagctggcagtagtcggagtaggactcgaagagaaagtgatcggaccggagacacttctaccgacaacaggaacggatttgtcagaagaacagcgcagtaaacttgaacagatccagggacaatggaaagagacagatgctttgtatggaattttcacttctgggtctacaggaactccgaaggcgattgtagtaagtcatggtgctgttagccggtttgtccgtcattttacagaaatctttgagattacatcagaagatgtgattggaaatcaggcaccatttgattttgacgtgtctgtgaaagatatttattccagcatcatgacaggggcacagcttgttttgataccgaaagaatacttctcgacaccgccgagacttctggattatctttgcgataagaaagtgaccaatctgacctgggctgtttcggcattaacacttgtgtctgcgctgaaaggattaaattacagagtgccggaatcagtgaaaagagttatgttcagcggagaagcaatgccgccaaaacagctgcgtatctggcaggaaaagctgccggatgcaaaatttgtaaatttatatggaccaactgagattacttgtaactgtacctatttcccgattgagcgacagtatgaggacagtgagaaaataccggctggtaaggcatttccgggaagaagagtaatccttgtagacgaggaaggtaaacaggtgacagaacctggtgtacagggggaaatctgctcggcaggagaatctctggcgaatggctattataaagaacctgagcagacagcggagaagtttgtgctgtatcctgtagatggaacagaacagagaatgtatcgaaccggagatcttggaagttatgacgaagaaggaaatatcgtatttgcaggaagaaaagatttccagatcaaacatatgggacaccggattgagctggaggaaattgagcgttctatgacagcacttgatggagtggagaagagctgctgtgtctttgatatggagaaaaatcgtattatgggattttatcttggagagaaagcagcctcagatgtcagaaaacagatgaaggaaaaacttccggtctatatggttccgacaaaattgattcaggtagatgagatgccgttgaacaagaatggcaagacagaccgtaattattttaagaattatggaaaaaatagaatgtgatgtcttaaaattaatcacaggaaaaagaataaggggaaaggataaatgttatgagagaagaactgcttcaagaggcgtttagaaagtatggaacgcccctttatgtgtttgatctggatatcttaaaagaacagacagagcgtattcgtgcaggctttggtccggggatcagcctttgttatgcaatgaaggcgaatccatttctgacaggatatatggctcagtgggcagaccgcatcgaagtctgctccatgggagaattccggatctgccggagactgcaggtaccattggaaaaattatttatttcaggtgttatgaaaaaacgggatgatatccgggagatactttcatattgcggaaataaatgtgcatatacagtggaatctccactgcatttccaatattttgcagaatggagcgaggaacatccggaggatggtgtgctccggttatacccgcggcttacgagtggaaatcagtttggaatggacgaagacactgtattagaaattctgaaaaaggcaaaggaacttccgagaatcgaggcagaaggaattcactatttctcaggaacacaaaagaagaatctgaagcgccatcagaaggaactggcatatctggatgaatttttaaagaaagcggcagaagagcagatcgatgtgaggtgtctggaatacggctctggaacggcagttccgtatttccgcgataaaacggcagagacctttgaagaagctggattaaagggacttcaggacgctgtgaagggcatgcagtggaagggacatgtaacagtagagctgggacgcgcgctggcggcgatgtgtggctactatttgaccaaagtggaagataccaagacgagtgacggcattcattattgcattgttgacgggggctgtcatcagctcaattatgacgggcaaatcaagggaatgtatgaaccgtatgtgaaggtacttccaaaggaagtttcagtgaaggttgcggaagtttccgaaaataagaatacagaagaaaagacctggaaagtttgtggatccttatgtacactgaatgatgttctctgcaatgaaatcaccctgaagggtttggaaaaaggcgtcatccttgtattcgagagaaccggtgcgtattcagcaatggaaggaatggcattgttcttgagccatgaacttccgggggttgtgctttacagcgaggaagaaggatggatccaggcaagagtacagcaggaaacttatgaattgaacatggtagaacagttacagattcaaaatgataggaaaagaggaagaaaaaatggaagaattattagcgattttaaatgagattgatgatagtattgactatgagaacgagacagctctgatcgatgatcagcttcttgattctttcgcgatcatcacacttgtatcagagctggaggatgcatttgatatcagcattgaagcctctgagatgatgccggtgaacttcaattcagcaaaggcaatctgggcaatggtacagagacttcaggaagattaagatttcaaaagtctgtcaatgattcgggaggcttcgcttcttgtcagcgtagctgcatcccagtcaggtatcagttctttctgttccgtcagacgttctaagagtgcaatctgctttggtgtggcaggctgcacttttttaattttatattgaagttgaagaggctggaacactttcggattctgtgactcaaaatagtgtgccagtgtctgataaagctttgcggttgcgagtgcatcatagtatgcacggtgagcagcaggattctcaatatgataatagtcgcataacgcaccgagacttttagactcaaagtctttatgtactttgcgggcaatttttaaagtatcgatccccattttttcaaatgcaagaccttctctgactgcactgcattttacaaagctatagtcaaacatgacgttgtgtccgatcagcacgtcatcttcacaaaaggagagaaaatcgtggatgacttccgggcaggatcttgctcctgcaaccatatcatttgtgatatgtgtgatgttggtgatcatcggtgtgatcggtttgtctggatggacgaattccataaaacggtcaacaacctttccttcccggactttgagggcaccaatctctataatttcatgttcctgaggacttagcccggttgtctccaggtcaaatgcaatatatgatttcagcatagaatgctccttatctgtaatgtcaataacttaatatcactatactaacattacagataagagaaagcaaattttataaaaatgattctaattctcgtatcatttcttcttctgttttgataatttttcttgccagcgcatcggcagatttgtcagccctgttcaatgtattggcacgttctccgagtgttttaattcccatgctgcatccatcaatcagaagttttgcaattttggagttatcatcattcagattcagtttaagttctgtgctgaaccaggaaaatgcggaagccatcattcccggagctttaacttcatttcccgaatcaatcaggtggtcttttgcattaccgcctaatcgagaatgacgatcaatgtatttttcaattaattggaataaggttgtatcttgggtgaaatctttgatttgctgcatactttcgattgccatctgacatcctgtgttgcattcttcatatagttttcgtgtttgttcatccatgatgaaatcctcctttttatggtgcgttatttgttacgaaataatatcaaagatggaatacgtgcatcagttataagaaaagaatgtgggtttctttatatagaatgtggataaaatacaaaattatacggtattttgtgaaaaacataacggtaaaggacttttctaagaatatttgttgtgctaaactaaaaaagagtttaacagaaaggaaaaatgtactcatgttaaagggaaaaactgtacttcttggagtgacaggaagtattgcagcatataaaattgcgtcacttgcaagtgcgctgaagaaattgcatgcagatgtgcatgtgcttatgacagaaaatgcgacaaattttattaatccgatcacatttgagacactgacgggaaataagtgtcttgtagatacatttgaccggaattttcaatatagtgtagaacacgtatcattagcgaagaaagcggacgtagttatgttggcaccggcaagtgcgaatgtaatcgggaagattgctcatggcattgcggatgacatgctgacaacaacaatcatggcgtgcaaatgtaagaagatcgttgctcctgcaatgaatacgaatatgtttgagaatccaatcgttcaggataacctgaaggtactggagcattataattatgaagtgatcagccctgcggttggttatcttgcctgtggagatacaggagcaggaaaaatgccggaaccggagcttttgcttgaatatattttgcgggaaatcgcaagagaaaaggatatgaaaggactgcatgttctggttacagcaggtcctacacaggagtccgttgatcctgtacgctatattacgaatcattctaccggaaagatggggtatgcgattgcaaaggtatgtatgcagcgtggagcggatgttacacttgtcacaggaccgacctctattgagaagccacattttgtaaatgttgttccaatcacaacggcgagagaaatgtttgaagaagtgacaggacgggccgaagaacaggatattattattaaggcagcagcagttgcggattatagaccacgctatgtcagtgatgaaaaggtgaagaaaaaggatgacgatctggcacttgaaatggaacgcacagatgatattcttgcgtatcttggagcgcataaaacaaaagatcaatttctctgtggattttctatggaaacagaaaatatgctcgagaattccagaaagaagctgaagaaaaagaacctggacatgattatagcaaacagtttgaaaatggaaggcgccgggtttggcgggaatacgaatgtggtcacagtgattacagaagattttgaaaaagagctcggcaagctgacaaaagaggaaacagcagatcgaatccttgatcagattctggcacagagaggggaagtttaaaagatgatactgacaatagacattggaaatacaaatattgtattgggctgtattgatggagataaaactctttttgtagaacgtttgtcaactgttcgtacgaagacagagttagagtatgcaatcgatattaagaatgtacttgatatttatcatattcatagagatgaaatcgaaggcggaatcatttcttctgtcgtgccgcagattacaaccatcgtgaagctggcggtagagaagatcctgaagaagaatgttcttgttgtgggagccggaattaagacaggattgaacattcgaatcgataacccagcacagttgggaagtgatctggtggtcgattctgttgcagcaattgttgagtatccggctccacttctaatctttgatcttgggacagcaaatacagtctgcgtgattgataaaaataagaattatatcggaggcatgatttatcctggaatcggagtttctctggattctctgacagctcatgcatctcagcttggcggaatcagtattgaagcaccggagcatatgattggaaagaatactacagagtgtatgaagagtggtctgatctacagtagcgctgccgcaatggatggaattattgatcgtctgcaggaacagcttgggggagaggcaactgtgatcgcgacaggcggactggcgaagaagattgttcctcattgtagaagagagattatcttggacgatgatctgctcctgaaaggacttgcaattatttacaaaaagaatcgtaagtaaaagatgacgcaaataaaaatgtaaatcaaatttgagtataaactgaaaaaccggaaagtaaaagaatttaaatttatcttttactttccggttttttatgtatatgtattaacgacacatatttatggaaaaattattttcctataagattctgtaaaaaacgattttaagcttacagtctgtcaccacgtttgatgtatcccggtttatcaggggatgcgataatacgcttaccacgaatcaggcgtgcatgtttgtcgatcacaaggttttcagcatgaacaccttttccgataaccacgtctgcaccgatgacacaattcttaacaactgccccttctttgattgtacagccacgtccgataacagaattctcaacagcaccttcaatcaggcatccgttagaaattacggaggatgttaccttgctgccttcaaaatactgtgtcgggcaggagtcatttgtacgtgtataaattggccagttatcatggaacagatctgttgcttttttcaggtcgatcagttcaaggtttgcttcatagtaactattgaagtctgagattgttgcaaagtatccacgatgtggatatgcgcgaacatcaagttcctcacaagactcattcacgatatcagccagtgtgtacatggaggaaagtttgtgtgccttctgaaccaggtcaaggaacagatctttcttcattacataagtatccatgaagatgtttctgttcttagcatttccaaggtttggctccatggagagaacacctttctgtttgttgatgttcagtgtctgacagttcgggaaatgatccttcgcattgtcaacagagtgatacatcagagtgatgtctgcacctgattcaatatgtgtcttgagaaatgcactgtaatcagctgtgtaaaccatgtagctaggcgcgatcacaacatactcagagttgatctcatcgaagcagtcaaggttttccatgtaagcagcgatatctgtgttgtaaataccgttgtcaatgttgctctcctggaagagagtaatcagtttaccgcgtttggagttgatattgtaatgacgtcctgttccgatgtgttctacgagagaacggggttttctgcgaacataaacctgcattacatcaattccactgttactcatgttagaaatcggaaagtcgatcacacgatatcttccgaggaaggagaaggcaccgatcggacggtatgcctgcatgtcatttacctgtatgttgtttcctgcaaagttgataattccaaaagctttactcattttattcgtccccctttactcgttttgcaacgagctcgatattctcgctggctgcgtctccgacaacagcgttctttccaatcttaatgccatcggcaacaagggcacgtgtaacaacggcaccttctgcaacctcagcacccggcatgaggacactatcaatgacttttgcaccggcagcaactttcgcaccagtgaacagaacagaattcttaactgtaccatcaacgacacatccctgtgtaatgaaggctctttctacaactgcatcagctccgatatactgtggaagtgcagttgcatcttctgtatagatcttccaatttgggtcattcagatcaagcttattgttcttatcaagaaggtccatattagcttcccagagtgaatcaattgttccaacatctttccaatatcctttgaacttgtatgcatacagactctttccgtcattaagcatagtaggaatgatatctttaccaaagtcatggctggaatctgcattcttcatatctgcgagaagcatcttacgaagaagtttccagttaaagatataaatacccatggaagcgaggttgctctttggatgctcaggcttctcttcaaattcaacgatatgtcctgtctcatctgtattcataataccaaaacggcttgcttccttcataggaacttcgataacggcaatcgttgcatctgcgttgttctgtttatgatattcgagcatcttgtcgtaattcatcttataaatgtggtctccagagaggatcagcagatagtctggggagtatgtatctataaagtcaatattctgggaaatagcgtcagctgttcctctgtatacatcaaggttcgcatcagctttctcacgtggtgggagcacataaactccactgtccttcgcatcaagtccccatcttcttcctgctgctgcatagctgttcagaagtacggattcgtactgtgtcagaacacctacaatgtcaattccgctgtttgcgcagttactaagtgggaaatcaataatgcggtattttccgccatatgaaacggctggtttagccactttttttgtcaaatcatggaggcgggttcctcgacctccggctaagatcatagccaacatattatcgtgtttcataaaaagccctctctttcataatactacttctttagtatactcttttttgtgcgatattgctaggattttacatagaaaaaataaaaaaatagcaaaaataatggaaaaatttatcgaaaatcatttgtcatttttcacaaaaaaagaaaataaggaaaatcagacagatttttaggcattattatatacaagtgaaaaggaacattaaaaaaattcctttaatatagaaagaattgattgatttcaaagcaggagtgtggcaaaatacaaatcacagtattcatgaaaatggcaggtgtgagatgaaagcaaatgtgaaatcagttttaatgaaaaaatattgcagagtatatcaggcgggggcgaagcttttgatggctgcacttccgtggcgttcaccgaaaatgctcagtggatcaggagcagtgaagaagctgccagaggcggttcgagatagaggatttcataaagtattaattgtaacaggaccgaagatccgtgcgagggggcttcttaatgaactgctggaagagatgaaagagaagaagttgaaatatgttatctttgatggcatttctcagaatcctacggatgaagaagttgaaaatggagtaggaatatttcttggagaaaagtgtgactgcatgatcgcatttggtggcggaagtgtgatggattgtgcaaaagggatcggagccagagttgcgagaccgaagaaagcagttcggaacttacagggacttttccgtgtgctacgtccgattcctgtaatctttgccgtgcctacaacttcaggcagcgggtctgaggcaacgattgcagcggtgatcaccgaggttcagacacatcataaagcatcaatcaatgatttgcaattgatgccacgctttgcagtacttgatccgcgccttacagtaggactgccaccacaggtaacagcacagacaggaatggatgcgctgtgtcatgcagtggaagcatacacgaatgatacatataacagtgattttgagcgtctgatgtgtagtaaggcagtacgattgattcatgaaagtcttctgacagcatatgaagacgggacaaatctgcaagcgagacaggatatgcaggaggctgcatttcatgcgggacgcgcatttacaagagggagtgtgggttatgttcatgcaattggccatgcgctcagcgggctctatggagtgcctcacgggcttgtgatggcaattctgcttccgcatgtgatgcgtgcctatggatcttctgtgtatgataagcttgcggatttgtgtgatatctgtgcgatggaagtagatacaccggacggtatgatctcagccgaagttcgtgccgaaacatttctccagtggatggaagagttaaaagagaaacttggaattccgaaatatccggatatgattcgggaagaagacgtgaaccagattgtaaaatgggcacagaaagaggcgaatccggtttatccggttccggagatctgggatgcacaggagatgaaagagtttgttctggccatgatggaaggtgcgagacttgaaggtgcagaaaagaatgaataaccgacaaaaatcggtgatggatgtaatgaattggaggaaataatgacagtatgagtgacaatgcaacaatgaaaaacacaacgattcatgacatgacgaccggaagtccggcccgcctgatcatgcagtttatgataccaatgtttttgggaaatatatttcagcagttttacaacattgctgattcaatcatagcaggacagtttcttggtgtaagagcactggctgcaattggaagtacgggatccttgatgttctttgtgacaggctggctgaacggtctgagtagtggatttgctattttggtgtcacagtggtttggcgcgaaagaatatgagaggatgcggcattatgtggcgatgtctatttacctttctgctggctgggctgtgcttatgacgattggtcttggaattgcaaatgagccaatcttacgtttgatgaattataaggatagcattatgccggacgtaaaggcatatatgggaattatttatgcgggtctgattgtaacggcagcgtataatgcgctggctgcatttctgcgtgcactgggtgattcgaaatccccattgtattttttgatcatttcagcagtaatcaatgtaggacttgatgtggcgttcattatttatggcggcatgggtgtagaaggatgtgcctatgcgacagttatcgcacagggaatctcagcagtactctgctttatatatatcgtgaagaagttccctattctgcatcttaaaaaagagaatttcagattttctcttccagcttgcggaaaattgatggctcttggagttccgatggcattacagttttctattacagcgatcggaacaattattgtacagggtgctgtaaatgtttacggggaagattatatggcaggtttctctgcggcagcaaagattcagaatgtaatctgcacagtattcgttgctttcggtgcaacgattgcaacttatgtgggacagaactggggagctggaaaagtagaccgtgtacgacaaggtgtgcgctgtacacagattatgattctggcttacagcgtaattgcgatgatactggtatttttctttagtaaatatctgacctacctttttatcagcccatcagagacgaaagttattgaagtatcagtgctgtatttccatacagtattctggtgttatccattcctgggaagtatcttcctatataggaataccttgcaaggacttggatatggacttgtgccgatgctcggaggagtgtttgaacttgcggcgagatctgcaattgtagttcttgtggcaggaaaaacaagctttgcaggagtgtgtctgtcagatccggcagcatggatctctgcattgattccactgatcccgtattatatctatgtgacacggaagtggaagaaacaaggaaagatagcgatgtaaaagtgaaagcaaaaaacaggcgcagggaatcaattatgaagctctgcgcctgtcgtttgttaagttaaaattattctgcggcttcttcttcctcttcatctgaagtaagatcagaagcttttacgtgtacttctgtgatagtaactactgttgcatcaagatctgtcataagatcaacatctttgtctttggcaattggaagatcagcaacacgaattgtgtccccgattttcagaggtccaacatcaacttcgactttctctaccaatgcggcaggaagagccttgaaggaaatctcctgaagcatctgctgtggtactcctgaagacagtttctcgaggtttacaaggtgaatctctgctacagagtgaaccttctcattgcttaccagtgcctggaaatctatttcatctatataccccttcaaaggattgtaatcaacttccttgatcagtgcatcataagtctcaccggcaacttccagcataacctggccacctttgttttcgactttcagaagtttttctatttcacctttatcaaatttcagtggaatagaatcttccagttcacgaccaaacaggtttcctgttacaaatccttcgcgtcttaatttttttgctttgattgacatgtctcttttttcagcttttaaagtattcatttatcttttcctccaaattactgaattcgcttagcagccttcaacttgtcaaaataataagtaggttttgttaagtgttctttttctttgctacagttacactatagcacccggtgtcaaggggaagggaaaagcagggagaattgtagggtgaaaaattaaggttttgaaggttgaaaaaggtgtgataaatgaaaaaattaaggttgtataacgggaatattcagggaattgttgtgaaaatggcgggaatgagtgtctcggaaggatgcttcagaagaaaaatgacgaaattaaaaaggaatcaaaacatgtgtaacattattgaaaatgcaaatcctttatgataaaatttcaaacagaaactactgatattagtcgaaatatcggtatagaaatggggaagaaacaatatggatttacagacattgatcgttttgatcatcgagttgatcggaacgatcgcattttcaatttcgggggcaatggttggtatccggcgaaagatggatattttcggtgtgttggtgcttggtgtggtgactgcagtaggaggcggaatgatgcgtgatgtgattttggggaagacaccgagcgcatttgtgaagccgatttatgtagaagtggcagtgatttctgcattagcgccatttctcttactttctattaataagagactgttgcatagcaaataccaagcactctatgcaggactaatgttcctgatggattcggtcggacttgggatttttacagcagtcggagtatccacaggatggacagcaggatatcatgataatatgtttttcttaagtttccttggagtactgacaggagttggaggaggacttctacgagatgtgatggcaggggttccaccatacatttttgtaaagcatgtgtatgcttgtgcatcgattgcgggggcaatctgttgcgtgctggcgtacagaaacctgggtcagattccggcacttgtgatcggaacagtggttgtgcttgtgattcgtatcggagctgcgcattacagatggaatctgccgtgcgtgaagctggaggatgaagaataacgaataggaaaatccaatttggtgacaagatactggtagaagtagttgtatagtgcaaacacttataaacacccgttattttatcttgagaaggatgaaaatagcgggtgtttttatagtcttatttataaaaacagttcattttcttttcgtccggaacaagctttttttaacttctgggaagcagcagccagcattagtggattcagcttgcgggaatgcgttggacagacgctgatacagcgcatacaggaaatacatttgtccttatcagtctgcgtaggattgtcagatggaattgctcctgacgggcatttcgctgcgcacaatccacaggaaccacaggtatgtgaagcaccagggataagcggaatcgtaccgtattcgcggtaaggtctgtcacccggaacatgtactggtggaaaatcagtttttacagtgttgtttgttttctcttttatcttctgtgcaaaggaagcgagttctgtaagatcattctgatcaggtcttccagttgcaaactgatgcatgatggaatgttctgcgatagccgcaatagctgcctggcaggtgaagttcttttcaatcagagtatcttcaagttcgatcaatgtatcttcataagcacggtttccgtaaacggtgattagaatcgcagttgcattatttccgttcagggctttgattctctctaatgcaatggcaggaacacgtccaccgaaggaaggaactccgatgatacagagatcttcttcggaaaaatcatttgttagatcagaagtcttttcgcataaatcaatgctctgatattcgccaaattgttcagctataaatgtaactattttttcagttccaccggttggactgaagtaaattgcgtatatactcataaatattctcccttaattaaatgttttggcagatacaataattttagaggttttagagttattttgcaagtgcctggttgatattaaaagataaaagtgatatgattcaaatagataaaatattatctaaaaatgcataaaatagttaaaaatagataaaatattatccataaagtgaggtggatgaatgcaacagttagtatgggaaacagcagaagaacttgatcaaaagcttgcgcaaagagtgcgtaatattagaaagagacgttcaatttcacaggaaaaattagcatctatgagtggtgtgagttatggttcgattaaaaggtttgagatgacaggaatgatttcattactttcattgacgaagattgcgatggcattggatatggcagatgaacttagagatatttttacaagtgtgccgtatatggatatccaagaagttataaatgagacgaggtctcaaagcaaaagaagagatagatttagatgagagtttatggaattatattaaagagagtaggagtttattatgagttacatcacaacatacacaggaaatcattttgatccgatcaatccagatccggaactaatcaacattgtagatatcgcccatgcacttccgatgatctgccggggaaacggtcaggtcagtacgttctggtcggtgggagaacattgcattctgtgcgcgaaagaagctgcagccagaggatacagcaatcgtgtgatcgagggtgcacttttgcatgatgcaagtgagtgttatatgtcagatgtgccgcgtccgttgaagcaatttatgacagtatataaagagcaggagaatcatttgcttgatgttttatataccaagttcctgggttcaccgcttgatgagcaggaagagaagctgatcaaagagattgatgatgcggtattgtggtatgatatgaaatatttactgggtgaagactcagaaggagacaagccggagacgtgtatggtacctgattatacggtgagagcattcaaggatgttgagcaggagtacttggaaatatttgaaaaatataaggtcttataaatatcaaaatgatgaaaaaggacagagagttctgattgaaaaatgtcagaaatctctgtcctttttgtaagtatcagtatagttcgcaactttgtattctgcggattgtttatctcagtcgagaagactcccacttcttcaggtggtgagtaacagaaaatggatgaaaaaacgtaagaagtgttacggttttaaatggctccggtaatctgttggcgaaacattataaaactttttaaatgtacgtgaaaatgccagctggtcttcaaatccaagtgaattggaaataatcgaaacaggaagttgtgtagttgcaagtaaccttgcagcttttttgaatttcagttgaagtagatattttttgggtgagattccaaacttttcatggaaagcccgtgtaaggtaattctgatggatgccgaaatagtcagctacatcttttaacttcaaattctcagcataattgatatcaaagtaaaatttaatttcatcgataattgacagtttatttgtgtctgcttcatgaaaatcaacatctgaaaaaagcatggaaataatatgaagcaggatactatttccttcaaaataatgactggtcaatgaggcgtctaattgcatgatcctggaaatagaatcgtaatattttcgggtatccagaccatggatcacataaatatcttctgttgaagtcataatctgatagagatagctttccgagctgatgccgataaagctgatccatgcataagaccaagggtttgtttttgaggcttcataataagtgatcttacctgccggaatgagaaatgcatctcctgcttttaggtgaaacacatgctcattaatacgaaatactccctccccgttgagtacaaaatgaattagctgatatgatctcaaagtcggaccataactgtagccaggtgtacattcttcataaccggcactgtacagagaaagatcactattggctttatataccagagaatgtttggtttctttatattcaatcataagtctatcataatacaaaaagttagttttttccatatattcttctgaaaatgctatgttccaaaatagaaaaatatagtttaatatagtcaggcgccagaaagtaaggacgggaggtcatttagaaatgataaaacggcagaaatatcatctggaaccggacagaggtctgctaaatgatcctaatgggttagttttttacaaggatatgtatcatgtgttctttcagtggaatcgatttgaaaagaatcattcttacaaggaatggggacattttacatcgaaagatttacttcattggaattgggaaggaagtgctcttttgccggaccagttttatgagcaaaatggagtttactcaggtagtgcattgataaaggatggtcagcttcgcttattttatacaggaaataataagagcggcggtgtgagaaaaagcagccagtgccttgcagttactgaggatggcaagacatttcagaaaaaaggcattgtggtatcaacacctacggagtttaccgagcacttcagagatccgaaagtatggcaggacggcgatgactattatatggtgatcggagcacagatgaaaaatggaagaggttctgtcgcactatgcagctccaaggatgcggaaaattggaaattcgaattagtgcttgcaaaatccaaggagtatgaaatggttgaatgtccggattattttcaggtagatggacaaggaattttgctttattgtccgcagcacagagataatgaaagtgatagttcactttgtagtttttcggcttataaagagtttgattttaatgacatagtttcaggaaaaatagaagatagcaatatgcagaatctggatgaagggcgtaaaaagatggatcagggatttgatttttatgcgccgcagacatttacatcaccggatggaagaaaaattctgtttgcgtggatgtcaagaatggaagaggaagaagagaagctgtttggtgcaggagaatccagtatccattgtatgacattaccaagagagctttcttatcgaaacggagaactgtgtcagcttccggtaagagaattggaaaaaagtttgtgcatacataagatttctgagcaggaaagacaaagtggagaaataattcttaagaacagagtatactgtgcaaaactatctaatcttcagaatgaaacttcttttgaaatagaatttcagaacagagaagttattctagaatacaaaaaagtagaaaaaataatttctgtaaagagaaaaaattgggttacaaaagattatgatgagagaaactgtaagattgattcgttggaaacgatagaatgttggtctgatatttccagtatggaaatttttgtgaatcagggaagcaaagtgttttctatgagaatgttcacagaagaagaaaatggaaaagtaaaaataagcggactcatgaaagaaacagtcgtggaaatgtatgatttaatgggagaaggagaggagaaaaatgagtgataaagaattagcaaaaaagattcttgaactggttggcggcacggaaaatgttgtgtcggtaagacattgtgcgacaagacttcgtattgtagtagctgataaagaaaagattcaggtaaaagagattgaaaatctggagaaggtaaaaggaagcttttttaattccggacagtatcagattatccttggaacaggtctggttaaccgaatctatgatgaagttgtaaaagttacaggaacaggcgacgaagaaaagtcagaggaaaaagaaaaggtagtttatggaaataaattccagagagcaatcagaatgttttctgatgtatttgtgccaattatcccggtgcttgtagctactggtttgtttatgggacttagagggcttctgactcaggaggcagtacttgcagtatttggtctgacagctgatagtattccgcagaatcttcttacatttacacaggtattgacagacacggcatttgcattccttccggctttagtgtgctggtcaaccttccggaattttggcggaagtccggtaattggaattgtattaggattgatgcttgtaaacagcagcctgccaagcgcttatgcagttggatcaggagaggcacagccgttgattttctttggatttttaaaagtaacaggatatcagggatcagtattaccggcatttgtgacaggaattgtcgcttccaagtttgaaaaatggctgcgaaagaaagttccggatgcaatcgatctgattgtgataccattcttaacattgttggttggatgtgttctggcattgttcgtacttggaccaatcttacatacagtagagtcaggagttctgtttgcagtagaacatcttcttttccttccaatgggaataggcggatttttatatggatgtttcggacagcttcttggtatttttggtattcatcatattctgaatttcttagagatcagtatgttggcgcaagatggatggaattatctgaatccaatcggaacttgcggaaatgttgctcaggcaggagcagttcttgcagttgcaatcaaagcagcgtctaataagacaaagcaggtggcatatccggcatgtctgtctgcattacttggaattacagagccggcggtatttggagtcaacttaaaatttatgaaaccgtttgtaatgtcaatgatcggtggtggtgttggaggatttctggcatcaatcttccatctgagagcaacaggaatgtcaattacaggtatcccaggaacattgctgtatcttaacgagcagctgccactctatattctggtaaatgtagttgctttcggtgtggcattcggactgacatggatgtttggttttaataagaaaatggagcagtaagtatgagtattctatttcataacaaagggcagatcgtgcaattaagtaatgatacaataagttatgtgatggaaattgtggatggaaaatatctggttcatcggtatttcggacgaaagatccgaaattaccgggggaccggaaatcccctgtattttaagagagggtataatacggaacatgacagctctgtcgaaaatgtatcctttgatgattttccgtttgaatatccggtcggaggacatggagattttcgtattccggcttttgcaatcacacaagaagatggaataacattttgcgaaccggtgtttaaaagctggagtgtagtatccggtaagcctaaattacaaggtatgccgcagattcgtgttaatgaaaatgagtcggagacactggaagtgatctgtgaagatgacagagcagggatccgactttttctttattatacaatttttgaaaatcacggaattgttttacgacatcaaaaagtagaaaattatgggaagcagaccgtttttcttcagaatattcagagtatgtctctggaacttccggcagaagagtatgaacttatgacattatatgggacacacgctaaagaggcaaatatgcagcgtttcccgattcattatggggtgcagaaaacggagagtatcaggggaagcagcagtcctcagcatcagccatttttggcagcgttaaaaccggagacgaatgaatgcagcggagatgtctgggcagcgcatcttgtttatagcggaaatttcctcgcacaggtggaaaaggatcagtttggaaatgtacgggcacagattggaattcatccggacagctttaaatgggaattgaaaccaggagatacatttgcttctccggaagcggtattgaattatagcaatacggggctgaatggaatgcgccacaattttcattggctgtaccaacagcatctaattcctaaacgatttgaggaaaagacacgaccggttcttttaaactcctgggaatctatgtactatgatgtaacaatggagaagattgatgaacaggcagacctggctaaagctgcgggaattgaattatttgtattggatgacggttggttccgtaaaggaaatgacagcagatcttcaatgggagactggatatgcaatgaacagaaacttccgggtggaattgcagcagttgcagatgtgattcataaaaaaggtttacagtttggactttggtttgaaccggaggcagtcagcgaggatagtgagttgttacgtcatcatccgggctgggcgcttcacattccggggtatcaatcggtaaaaggaagacatgaatatctgctggacctttcaagagaagatgtccgtgaatatttatttaaaacattagatttttatttgaaagatggaaaaatcaattacataaagtgggatatgaaccgaccgctgacagatgtgaattctgcatgtctgggagtacagcaaaaagaagagatcagtcatcggtatgtgcttggattatatgatattttggaacgcattacagaaaaatatccggatgttctgattgaaggatgttccagtggtggtgcgcgatttgatccgggaatgttgtattatgtgccgcagaattggacaagtgacaatacggatgcatttgaccgtgcgacgatccaaagagggtatagccttttatatccgcagataacaatgggtgctcacgtaagtattgttccgaatcatcagaccggaagaagtacttctctggatgcaagatatcaggtagcaagattatttaatctgggatatgaacttgatcttacaaaatgttccgaagaagaaagaaaagaaattgctgatcagattcaggaatataaagaacagagaggctggctgcaaaatggagtgcttagttatcttgaagttccgaatgaaaattatattgcatggtcggttgtttctgcgacgggagaagaatgcgaagttattatcatgcagaaactgtttgatccgagatattctcatggaagaattcatctctgtggtctgaatccggaatgggattacaaagatgaaagtaccgggcagattttcggtggagatgaactgatggagatcggagtatcgctaccattaataaaacgagatttccatacatttgcatttcatttttcaaaggtaaaggagaattacggtgatcagattaattgcaagtgatctggatgggacacttctaaatgaggaaggcatgttatcagagaaaacagcggagtgtataaggaatgcacagcaggcaggaattctgtgggttgcggcaacaggccgttcgctgaaaacggcatctgagcttatgagaacagcgggagtttcaccggaatatcttctgctaaatggagctgaattccgaaagagtgatgggactttgattttccaaaaatcaatagaagaatcctgtgcgcaggaaattatacagatgctcatggaaaagaagcttgattttgaaattaatacttcagtaggagatttttcgacagactgtgagttttgcgatacggctcgcccaatgcccgcagtggaaaaaatttttgatgcgcagattaaaattcaaaagatatttattttcccagaagagcagaataagttgaaaaacataaaagaatttctgaagaagagacaagatatcacagttacttcatctgcaacttggaatatagaaattacagaccgacaggcgaataagggagctatgctggaacagattgcagagtattacgggtggagtaaagaagaggtattggtatttggggatggaaataatgacatttcaatgtttgagaaattcccacattccagagcagtgaaaaatgccgtagaaagtttaaagaaaaacgcagagaaagttatcgaatctaatagagatgatgcggttgcacaagaggtatgcagattgttgcaacatctaagtttgtaagcgcttggttgatatcagaagaaaaaatgataaaaaggacggagagttctgattgaaaatgtcagaactctccgtccttttatccatttattttacaacagctgtcgcgttcaatcagctgatgcggcacgataatctttgttgcaacaagattcggattctcaatatgattgatcatctgtgatgccgcctcgatacccagctgcttggaattaatatcaattgaagtaagctgtggagatgtcgatcttgcaaacagagagttgttgaaagagatgatcgacaaatcatcagggattgaaacatgattctgaagacaaactctttcaagagaaacagcaagaatatcatcacttacaacgattgcagttggcggttcatcctgcagtaacagagaagaaattgcttctgtgttatctcctgatacattcagaacttccgcgcagtattctggacggaaagggattccgtgtttagtcaatgccatctggtaaccggtttttctgtctgcggcaaaagtcagtgaactgtcggaacccagataagcaatcttgcgatgaccgagctgatagagatattcggtcgcgtcctctccggcaagaagattatcattgtcaatatataatgtctgattcgtgtactgtgttgcttttccaatcaagatataaagaagcccttcgctgaagagataatcaataatcggatcgtcctttcgagaataaagaacgatgaacccatctacttttccacttcgtgacatagactgaatcgcttttaagatctcatcttcatcttgacctgtcacaacagtagacatgtattgtctctggttacagtagtggctgatgccgcgaattgcttcaagatagaaagcattctcatatacttcacgggcagatgccggaaggataatcccgatcgtgcgggaatactgagaagcaagattgctggcctgaaagtttacttcgtaaccaagttcgatcatcgctttacgaactttttcttttgtttctgtgctgatggatgggttattcttacaagttctggagacagtggaaggtgatacacctgccaaagcggccacatctttaattgttactgccatattttccctcctgtgaggaaatgaggatgtcaggagtctgacacctattttcctttattttcacgtaactgttcagagccaacatccaaaatgctacgcatttcgtcggtgtggcgtatccgccaaataaaatttcaaaaacagtcttaaaaatgcaagcattttatacctgttttttgaaatttagcttggctctgaatagttacatttttacaaaaaattcgtcacctactattttagtgaaagaacgcaatgatgtcaaatctgttgcatagttttttgcatagaaactgttgtgagaatgtacaaaaacagagcatataaattgtgcaaaaggcagaaatagaaaatagatttataaatagaattgcatttcgtgcaaaacgtacatataattaatgcaaacggttgcgcagaacaatgcaacaaaaaacgtgccacatgatgcgatggcatgcagggagatctaaaagagaaatttaaaggtggaaacgaaaggaaagaagaaattcaatctcaattttgatttgcttcagaaattaggtaaagttctgatgacggttatcgcagttatgccggcagcaggattgatgatcagtatcggtaagctggtacagatggcaggagcggatctttctatcgtaatgacaatcggaagtacgatggagaaggcggtggagcagtgaaagatgccaaacgtctggattacattttctgtaatacgcagaaaaaagtaaagtcatcgaaagtggtatataatggtaagaattacccggtagtatccgatcattatggagtaatgattgaggtagaagattaagaggaggaagataaaatgagcgaaagagcagcaggtattttaatgccgatcagtagtttgccgtcagagtacggaattggttgtttttcaaaaagtgcgtatgaatttgtagattggctcaaaggagcaggacagaattattggcagattctcccgcttggaccgaccagttatggagattctccatatcagtccttttctacatttgcaggaaatccgtactttatcagtcttgatgaactgatcgaggaaggtgttctgacacgtgcagaatgtgagaaagtaaactggggaaaagcaaagggttccattgattacgagaagatttataatggacgttatccattacttcgcaaagcttatgagagaagtaagatcagtgagaatccggagtatcagaaattcgtgaatgagaatagctggtggctgtcagattatgcactgttcatggctgtaaaaggacgatttgacaatgtagagtggacaaaatgggcagaagatatccgtctccgttggaaatgggcaatggattattacagagaggaactgtattatgatattgaattccagcagtacatgcagtttaaattccacgagcaatggatgaaattaaaggcatatgcaaatgaaaatggaatcaagatcattggagatatcccgatttatgttgctatggacagtgcggatacctgggcacatccggaactgtttcagttagatgaagcaaatatcccgacagctgtagcaggatgcccaccggatggattttctgcgacaggacagttgtggggaaatccactataccgttgggactatcatagagagacaggatattcatggtggatttcaagactgcattatgtattccagatgtatgatgttgtcagaatcgatcatttccgtggatttgatgaatacttttccattccgtatggggcagagaatgcgatcgggggacattgggagaaaggtcctggaatcgatctgttccgcaaagtggaacaggcacttggatggaagcaggttattgccgaagatcttggttatgtgacagattctgttcgtgagttggtccgcgagagtggttttccgggaatgaaggttctggaatttgcatttgattcccgtgactcaggttgtgcgaatgattatcttccacataactacccggtgaacagtgtggcttatacaggaactcatgacaacgaaacaatcgttggatggtggagcagtatcacaaaagaggagcagaaactggcgagagattacatgtgtgaccagtacacaccggaaagggaactgtataaatctctgatcagcctgattatgcggagcagtgcaaagctgtgtgttattccgatgcaggactatttagggttaggaaataattgtcgtatcaacactccgtctacggtaggaaagaactggaagtggagagtgaatacaagacagttgtcattgaaattgcagaaggaaatccaggagatgacacttagatatggaagaatgaactgggagacagtcgagtaggattctaaaagataaaatttcatgaaaaagagacggaggtttctaattacaaaatgtcagaaacctccgtcttttagtcttctttaacatagttgggttaaactactgtcttttttctcaacgtccaaagagcaacaatcagtgtcaatatctcagctgccggaactgccagccagattccatttaattccaagaacctcggaagaactgtcaggaaaagaagcagcagagcaaaggaacgaaggaaagtaatcatacctgagatatatcctttgccatatgtcatcatacggattgctgcgaagatattgattcctgaaaataagaatccgagtccatataagcgcagtccggaaactgccatgtcaaagactgtgctgccgggagatgcaaagaaacataccccaattggtgccagcagataagtgcatccgtagagaatgatcggtgcaatcgcaaagaagcgataagcgtacttttctaaaacacgacagacagagaaatttctgtctccgtaagcatatcctagtggcgttgatagtcccatagaaaatccaaaataaattccgatacataagaactgtaaatacatgatgattgaaacagcagcaacgccgtcttctccggcgaaaagtagggcacttcggttaaagacaacggttgtgatcgcaattgcaagctggtttacgaattcagaagttccgttgatcatgctatgaaatgcttcctttatggacagtccgcggaatgtaaaatgaaggaagttcggatgtgttacaaagtaaaccactcccattacgaaagaaagcagaaggccgaggaaggttgcaagtgcggcacctgtaattcccatatggagctgtccgataaaaatgtaatcgaaaacaatattaaaaatccctccggaaagtgcggtcagaaaactgtacgtcggagaaccgtcaacacggatgaaataagtgaacatctcttttccaaccacgatcggagcaccgaacagccaccagtagatataagctttacaatcttccatcaacagtgaggttgcaccaagcatctgcaggatgagcggcaaccggaaaagaataagcgcagagacaagagcgccaatgacaatggcagcagccatgcttaccgagaaagtccggctggcttcgtcatttttctttccaccgatatgaagagcagcaagcgcacttccgcctgtcgcaaaggcaagtgcgataccgtacagaatatttacaagcggatagacaacgttgatcgcagcgagtgcatttgttccaacataagcagaaacaaagattccatcaacgatcgtataaactgtagtaaataatgaggtcagataagttggaatgataaagcgtaataatttctttaatcgaatctcatctaccgaacgaaatataagagttttttccataaggaagcctccttgttaaaaaaatatcttagtataggataaaccttaaaggtacttgaaggtcaataaaaagattgctaaaataccagtagcaagatgtcggtatcttcatgaacgataaagagaaaaagatcatctaatcatcaagaggaggtggaaaatatagctttggaatttcaaataggagagatatcccatttctttgacattcccgcatctacattgcgctattgggaagagatgcaggttctatcaccgaacaaaggggagacaagtcattatcgggagtatgcggtagaagatctgatgacaatttctgatgtgatcttttataaaaatctcggatttcagttaaagcagatccgagagatgaaatccaatacaccgaaacaacaggcaaatctgtttgaacagaagttatcggagcttgaacaggaacaggaactgctaagacttcgaatgaaaaaactgcaaaggcatattgaggcggtgaagacgttggagaaattgagacagacgccttatcaggaaacagagatcgatacggagtgcattgtctcttttgagttgattgagcagaagaagttacttcaatatattgaagatccgtatctttattcccgcgtacagcatacggacacgctgcagcaggaacaacgtggtctgactgtcttgccggacgcgagcaatgtgtttgacgagtcacatattatctggcgtaagcatggcggcagatatatgacatttcttatgaaagaagaagttgccgagaattatccaaatgacttgcagaaacatatagaatatctacagcaatatcataaaacaggggatgtgatcagtcgctttctactctgcgcacaggaagacggtaaggtatatgatttctataagacctttgtagagatttgctgatcattatgaataagaagaaacgatactagcgtggaaaaatatgcaaaacatagaattcacaaataaatcaaaaaatgggattgaaattcgcagaaacagtgactataattttttagttagtaagagaagtaatgagtggatgaaagacgtctaaggaggagttagatatgagcaatcaggagaatgtatttgaaacaattttagcacctatgaccggtacagcagtagcaattacagaagtaccggatcctatttttatagagaagattcttggagatggagttgcaatcgttccggcagaaggtaaggttgtaagcccggttgacggaactgtatcaaaagtagcagagacaggtcacatttatgctgttacttccgataacggagtagaagttgtgatacatgtcggacttgagacagtcgcactgaatggaaaatgtttccagatccatgtaaaagaaggagacaaggtaaaagcaggagatcttcttgcagatgcagaccttgagtttatcaaagaaacaggacgtaattccatcacaccgatcgtcatcggttcaagccttgaagggaaagagcttgtatgtgaagagggagaagttcaggctggaaaaacagttattatggaaattaagcagaaataagaagtctgaagatattgttccagaatcggtttagcttagaaggaaggttatagtatgaaagaagaaagatactcaatcatattcagcagcaaaacaggaaatacagcagagctggcaaatgcgattcgtgatgcattgccgcaggagaattgtgattatttcggaacaagcgaaatcgaagaaccggtatcggaaatgctttacattggtttctggacagaccagggaaatgcagataaatccgcattggagttattgcaaagaataaagaataagaaagtctttctgtttggaacagccgggtttggtgagaaagaggcatattttcagaaggttctgaataatgttaagagttctatggatgaaagcaatcagatagttggtgagtatatgtgtcagggaaagatgccgcaagcggtgagagaccgttatgtgaaaatgaaagagcagccggatcatatgccgaatcttgatctgctgatcgcaaattttgaccgtgctttatcacatccggataagaaagatctggataaactcagagagttggttagagggtagaaaagtaaagaaaattttgtttgacttttaataaaacaggaaatataataactacaaacgagtagcaagtaagcgtaaatccagtttaccggctgctcgttttcttattaaaatagaagtaactgttcagaggcaacctccaaaatgctacgcattttgtcggtgtggcgtatccgccaaataaaatttcaaaaacagtcttaaaaatgcaagcattttacacctgttttatgaaattttgcttggctctgaacagttacaaatagaatatcgccatgaaaaagtgtgtagcctgtcagcgtaagtccagcttataagacaaggtgcgcactttttttgtgcagaaaagagaggagttaaaacaaaatggcggaaagcaacaaaatgaaggatatgccggtgaataagctgatggtccagatgggaatcccgatgatcttatctatggcattgcaggcggtctacaatattgtagacagtgcatttgtaggaaatatgagagtgggcagtgaggcagcattaaatgcattgacactggtattcccggttcagatgcttatggtagcagtgggaatcggaacaggtgtcggaaccaatgcacttctggcaagaacgcttggccaggggaatagtaaaaaagcagcaaaggtggccggaaacagtctgttcctgggagtgatcatttatgtggtttgtttattgtttggcatctttggagtgaaagcatacatttcatcccagacagtagatgcagaagtttttcagatgggtgtcagttatctgcggatatgctgcgtgatctcttttggaattattttcttttctttattcgaaaagttattacaggcaactggacgatccctttattccacgatcggtcaggtggtcggagcagttgtaaatattattcttgatccgatcatgatctatggtattggaccttgcccggaaatgggagtgaaaggcgcggcctatgcaacagtaattggccaggtagcgtccgcagtattgctgttcattttccatataaaactgaataaagagtttgagcatggggtgaaatatatgaagccggatggcggtgttataaaagaaatctatgcaatcggacttccagcgatcattgcacaggcattgatgtcgattatggtttatgtaatgaatctgatcctaaagttcaatccgtcagcacagacagcatatggtttgttctataaggtgcagcagtttgttctcttccttgcatttggtctgcgtgatgcgatcactccgatccttgcatttgcttatggaatgagaagtaagaagagaataaaggatggaatcaaatatggtctgatctatacgattacattaatgattcttggaattgccattacagagattttccctggggcgttcgcaacactgttcaatgcaggacagtcaagagaatattttatcggagcaatgagggtaatctcagtcagctttctgtttgccggaatcaatgttgcttatcaagggatttatcaggcattggacggtggtatggaatcgctggttatttcacttttgagacagcttatcattatcctgccactggccggaattttttcgatatttgtcagaaatggccagatgggcgttacattaatctggtgggcatttccgattactgaaatagtttcatgttttgtaggatatgtgttcttaaagaagatcagaaaaaataaagttgatgttttaagttaaggaggaagcggagatgacaaaaagaattattacaatcagcagagaattcggaagtggtggacgttttattggagaagaagtagcaaagaaacttggaattgcttattatgataaaaatatcattaatgagattgcagaaaagtctggtttatctccggaatatattcaagaaaatgcagaattatcgccgaaaaaaggattattcgcatatgcatttgccggacgtgacgtcacaggaaaatcagtagaagacctggtgtatgaggcacagagaaaagttattttagagctggctgaaaaggagtcttgcgtgatcattggaagaaatgcggactatattctgaaggatagggatgatgtgctgaatgtatttatccatggggatatgccggaaaaaacacagcgaattatggggttatataatgtagaagaaaaggaagctgtcaaaatgatggcagatacagataaaaggcgtatggcgaattacaatttttatacggatcagaaatggggaaaagccagcaattatacgttgtgtctgaatagttccaagcttgggtatgacagatgcgagaagataattatggaatgtatatgactgtgaaaatacattttatgaaatataaaaatgacattgcatattttgtgataagatgtattcagtaaagaaaatataacataatgatacaaggagatgataggaataaaacaggattaaataaattaaggggcgtgaatctactgtcgattcacgcccttgatttattgtgagattgtttttagtaatctatgtgacatacaataactgtaaatacatgcaataatttctgcaatccagaatgcataccagccatgtgaaatgccagagatttttataaaaatccaaaggcatggaaccagtaaaataagctgacggatggcagcaccaaccatgttaatgataccatttccaaggccggaggaaaagtatccgcaaagaatcgtaattgcagacatcacaaaggaaatggaaataatcctcagtgccggaatgccgagcagcagcatttctgaacttgcagaaaataattgcagcaactgttcgggaaaacaccagaatataacagttccgcacaaggcaatgattgctccggtaggaagtaaaatcttccatgtctgttgtacacgttggtagtttttatcgccgtaattatatcctacaatagatatggcagcctgtcccagtacattgatcggcatcatcaggaaattttgcagtttgtagtagataccaaaaaaggcaactgctgttgcggaaacatcaagaagaatacggtttactacaaatgtcataatgcttccgattgcctgcataatgattgttggaagccccacccggtagatatcagcaacatcctgccacatgaaatgatagtttttcagacggacatggatgattggatttcgaaaacggttaaacagtaaggcagcgatagcaccagctatttggccaatgacagttgcgatcgctgcaccacggactcccattgcagggcagccaagcagaccgaaaatcataataggatcaagaataatattcaaaacagcaccaatgatcagagacagcatagataatacagtatctccaaccgcctgtaacagtcgctgagcataagtttgcagaaagattccccagcaatatacaagattgatggaaagatattgtttgcagagttcctgaagttctgaatcagcagccagtttagtggcaatcgtatcggacagaaaaatcccgatcattgaaaagataagagacgtaaaaatcatcaggaaaagtccggttgtggcagcacgacatgcttcctccggcttatgttccccaatttttctggaaagcagagcattcagacctactgcagttccgacacctacggcaatcattaagaactgaatggaataaaccaaagatgcagcggtcagcgccgtttcagacagtctggcgacaaagatactgtcaacaatgttatagagtgactgtacgagtaaagacagcattaagggaaccgccatcgtgtacagtaaaggacggattggcatttctgccagtttgtttctggaattcataaaacctccttatggcattgcaaaaaaataagcgtgaaatctgtaaggacaagcaaatcctcatgatttcacgcttttacaagccggcttttgttacaattatttttcttcggacttattataaacgaaagagaagaggaaatgcaagaaaaaaattaaagcagcttgtatcactcagacattgtgtttttccaatcatgacggagaaacgacagagtatgcaaaaaaagcgattgtacaagagtatgagaagtataaagcacagttggaaaagggtggtacaaagtacaaaattttatcagaaaaaacaaatgaagatggatctattgtgattgagatcaagaaacagtataattcttctccggttggtgaatatctgaattaaaaaaaagaatttcacgcatttttttgaaaacatatatgtgaaaagttgtaaaaacaagaagtttttaaggctaaaccagaaaaacttcttgtttttttatgcataatctggatatgataataaaaaaagaaggaagtaggaacgatgtcattagaaaaagcaaagaagtatttaacagaacaaggttatgcagatcatgtcattgaactggaagaatcaagtgcaacggtccaacttgcagcagaagcactggatgtagaacctgggatgattgcgaagacgatgtcatttctgacagaggatggtccaattctgattcttacggaaggaacagcaaagattgcgaatcgtaaatataaagattattttcatgagaaagctaaaatgattccttttgatgaagtagaagattatatcggacatgctccaggtggcgtatgtccatttggaattagagacggagtcaaagtatatctggatgaatcattaaaaagatacgatactgtctatccggcagccggcaacgaccatagcgcagtaaaactgacaattgtggaactggaggaagttgcaggagcaagtggatggattgatgtatgtaaatagataccgatagacggaaacattactcacgaaaggagatgttttatatggctacaaaatcagtaaatttatatgcaaggattgaaattacaatatgcatggctcgtaacgttcacaaaatcttcacaaaataattagcactcacctcttgacctggctaaaagttgcgtgctatataataagtagaacaaaggaagacagagaaaaaggaaatgaacttctgaatcctccgaatgttctgacaacaactgcgaaagcagcttatataaattgtgagatcttctcacaaaaggcaacaaagttagttagcattgaaaggagaaatgacttatgatgatgcctagtatttttggagaaaacttatttgatgatgattggatgaacttcccatttgagcaggatttctggggaaagaagaatccgttatacggtaaacacgctaagaacttgatgaagacagatatccgtgagcatgacgcaggatatgaagtagatatcgatcttcctggattcaagaaagatgagatcagcattgagcttgagaatggttatttgactgtatcagctgctaagggtcttgataaggatgaggaagacaagaaaggtaaatacatccgtaaggagcgttatgccggagcaatgcagagaagcttctatgtaggtgagaaccttacacaggaagatatcaaagcaaaatacgagaatggtattctgagactgtcagtgccgaagaaagaggcaaaaccagttgagacaaagaaaacaatcgcaattgaaggatgatttgaacactgatgtgagtcaggtgtcaaatgtcgaaggggcttatgtaagccccttctttttgtatataaataagataaatatgaatcataaacgcacaaaaaatcagccgtaaatatttacgactgattttttgactttataatacatttgtaatttattcagtttccgctttgattccctgatcgaagatttcaacagcttttttatttggctcagcagtaagttttgctacaataacagcaatcagaagacttgcaaagaatccagggacaatctcgaagatacctgtggcatctgtcattcctgtgagcagccatccgagatctacaacgaatccggagattacacctgctacagcaccctggtaattaaagcgtttccagaacagtgacagcagaatcgtaggtccgaaagaagcaccgaaagcgccccatgcattttcaaccatatccatgatagcctgagcaccacttcccttggagtttgcgataccgaaagcaatcagggagaggatcagtacgaggatacgtccaaccatcagcgtctctttttcagaagcattttttctgaagaaaggcttgtacagatctgctgtgaaggagctggatgctaccaacagctgggaatctgcagtggaaatcgaagcggcgatgatcgctgcaagcagaagtccacagatgcctgccgggaagaatcttcgcgccatagcaatgaatacaagtttctgatttccctgagtgagcagttcagcgcccataaccattctgcctaagtaagcaatcaggacagcagagaacagtgagatgattacccatacaattgctacgatagaagatttcttgatcatggatggtttctcgatagacataaaacgcaccaggatatgtggcataccgaagtatcctaatccccagccaagtccgctgacgatatcctgccagctggcatcaaagataccgcctccgaaagcacactgtgttacagcgcctgtagcagcatcagtatactcatatactgtagtaagagcagtaggatccaacagatcactgtgaccgatgcagactacgagaggtacaagcatcagtgcaagcatcatcagtaatccctggaaaaagtctgtccagcaaactgccgcaaagccaccaaagaatgtgtaggcaacaatgatcagcaagaatgcgaacatagcaatcttaggagaaactgtcgggaacagtgttgtgaatacagaagtaccggctaccagtgcagatgctacataaattgtataagcaaacaggaagatcagtgcacaagtcaactgcagtgatctggagtctgttgcaaaacgatttgtcagatactgtggtaatgtgattgcatcatctgcagctttagagaatgtacgcagacgttttgcgcacagaatccagttagcagctgttcctaatgcaagaccgataccgatccacatctgtccgaaaccgaaagctaagatcgatcccggaagtcccatcagcagccacgcagacatatcggacgcctgtgcggacagtgctgttacccaaggtcccatagatcttccaccaaggaagaagtcctcggagttcttattggtaccgttaaagtaaaatactaacgctacgccaagcaaaatgacgaaatacgcaataaaagtaatgatttcccaattcatattcttttatcctttccttatattattttatatgatgatatcgggcaggattgtaagaaggcatagcatttgtacaatccataggtatcaaaatcataattgaaggcatttttaacccacaataacatttaatttaccgcaattaggcggatattgtcaatagtttgggggaaactactattgtttcaggtgtttcttatagttctgcggttagtagaaacggacagagattttttcataaattatgaaatattgatggaatctcaccttgtattgtgagataatagaaaagtaagagttctattgctgctcgtaggtaactgcgaacagtaatagatccgtatctgttcagtatcttcacagataccagtattctaaaaagtagaaaacgaggtagaacaacatgaaactgatcaaggagaagaagatttatactgggaacggtgtaatcgaaaatggctatatccgctttgatgagaagattgaagaagtcggtgatatggcggggttcgagccgaaagaaggggatcttgaggtaagttgtgcaggaacaatggttgttcctggatttattgacattcatagtcatggtggttatgggaaagataacatggatgctacaccggatgagattgatgagatggttaagcagatgacaaagcaggagggaattacaacttatttctgtacaactatgactcagacctatgagaacatcgagaaagcaatgcagaatattcatgatgcggcacagaagaacccggtaatcaaagggattcacttagagggaccatttatttcaacggtgttcaagggggcacaagatccttcttatattaagaagccagatgaaaaaacactggcaaaatggaatgagatcagcggtggtctcctgcgtattgttacttatgcgccggaagaggcagatccatcatttgagacatggtgcaaggaaaatggagttgtcttaagtgcaggacattcgaatgcattatacggggaattgaatgcaagcggagcaacacatgtgactcatctttacaatgcacagagaggactgaatcacagagagcctggtgtgacaggatatggtatgctggcagaaggggtacacgcagagctaatctgtgacggaaagcatatcgtaccggatatggtgaaacttgcatgcaaaataagagggtatgatggaatcgagctgatcacagactccatgcgtgcgaaaggaatgccggaaggaaagagtgagctgggcggacaggtcgtaatcgtgaaagatggtatggcaaagttggaagacggaacgatcgcaggaagtatccttacatacattcaggcatttaagaatgttatggaatttacaggtgctacagttgaagatgcagtaaagatgacctctggaaatcaggcgaaagagttcggacttgattctaagggggctattgcagcaggaaaagatgcagacatggttgtattaaatgatgcgtttgatttagtacagacgattagctacggtaaactcgcataaggaataagaagttataaaatatatctacagaagcaggaagcaaatagatttgatctatgaaaatatggggtggcttccaaagcactcgatataaatataatgaaatgagagggtattaaacatggaagtaattgtaaagaagaattatgaagagatgagcaaggcagcagcaacactgtttgcagcagagattatggagaatccgaaaacaatccttggtatggcaacaggatctacaccggttggtctgtacaaagagcttgttaaaatgtatgaggctggagatcttgatttctctcaggttactacatttaatcttgacgagtatattggactggcaccggagcatgatcagagctatcattatttcatgaatgacaatcttttcaatcatgtaaatatcaacaaagagaatgtacatgtaccggatggggttggatttgaagctgaagaggcaggaaaagcttacgaagaactgatggcaaagacaggacaggtagaaatccagctgcttggacttggatgcaatggacatatcggattcaacgagccggcagatgagtttacaaaagtaacaggtgagatcgatctgacagatagcacaattgaagcgaataagcgtttctttgagaagaaagaagatgtgccgagaaaagcagtttctatggggatcggaacaattatgcgtgcaaagaagatcgtacttcttgtaaacggagagaataaagcagagatcctgaaagaagtagtaaacggaccggttacaccaaaggtacctggaagtatcttacagttccatccacatgtaacagtgatctgtgatgaagaggcagcaaagtacctgtaaaatgcctgcaagaggtcatcaactgacatacggttaaagcttatagtagcttgtgtctagagagacttcttagtaaacgataagaaccatgaagaagctgccaacggcagcttcttctaatatataaaaattattgaaggaaaatagaacatatgaaaacaataatattagaagcatgcacagattgtgtacaatcagcgatcaatgcgcagaaaggtggcgcagaccgaatcgaattatgcagcaatcttgtgatcggaggacttactccggggaaggcattatttgatcttgtcaagaaatatacagacatcaagacgagagttcttcttcgtccgagatatggagattattgctataaccaatatgaatttgaacagctaaaagaggaagttcagatgtactgtgagatgggagctgatggagttgtcatcggaatgcttaatccggatggtacattggatacagagcgaatggcagaacttatcaaggcagcaggaaataaagaaaaagcgcttcaccgtgcatttgatgtctgtatagacccgatgaaagcactcgaagaagcgattgatcttgggttcgatacgattctgacaagtggacagaaagaaactgcgtgggaagggaaagagatgctgaaagcacttcaggagaaaagtgcaggaaggattgagatccttgcggcaagcggaattggtgcagaatcaatagaaaaattacttccgtatacaggaattacttcttatcatatgtctggaaagattgtagtggacagtatgatgaaatatagaaaagaaggaatcggacttggattgtcggaacgtggagattatgcgctttggcagacttcggaagaagaaatcgtgaaagcagtaaaggttttaaaaacaacaggttaacttcaacagacatgtcttgcacagcttcacaaaaacagttatactcataggcaaaggcaaaaaatatatttataagacaagaaagttttaacaggagaaagcggattatgatcaaagtaatagcaagtgatatggatggaacactacttggagacaatcacaaagtagcaccggagacagtagaagcgatccgtgaagcacaggcggcgggaatccgctttatgatagcaaccggaagaagttataatggagcaatggaagaattaaaaggtctggatcttggctgtgatttcattgtgggctcaggcgcagagatacgcaacccaaagggtgaaattctaaaaagcataggatttacatatgagctctgcaatgaggtggcaaaggtattggaagaatatccaatctcggtattgtattgcgccggaccttatgagtatcgtgtgggaacaccggaggaagtagaggagagtattgttcgtcagattcagctgttccatttatctgagtgcagagaccaaatagagcagtcagaactttataagcgagtgaaggcaagttcaagacgaatcgattctgtggacgaattagagaaacagggaattatgatccataagattttcctttttacaggcgatctggagatgcttgataagatcaagcgaagactgatgcagaatccggaactcgcagttgcgtcttccttctataataatctggaaatcacggtaaaaggagcggagaaaggacctgcgattcaggaatatattgaatccttaggttatacaaaagaggaagtgatggtgtttggagacagcctgaacgattactctatgttgtctatggattttggagcaactgtcgcgatggaaaatgcagatgaggaagtgaagcgggtttcaaaatatgtcacaaagtcaaatgaagacttaggggtggcatatactattcatgaactgttgaaaaagcagggaaaaatcaattcaaattggtaactgttcagagccaacctccaaaatgctacgcatttcgtcggtgtggcgtatccgccaaataaaatttcaaaaaacagtcttaaaaatgcaagcattttacacctgttttttgaaattttgcttggctctgaacagttactcaaattgtgaataacttttcaaaaaatgaaaatgcatgttgataacacaaaataaaagcgaggcaattaagatggatgtaagacagaaaagaaacaaagtacttggagaacgtgtggtgaaagcacttgaatccagaaatatggatgcttattatgctgagacaaaggaagaagcagtgcagaaagcactggagtggattccggaaggaagtacgatcaatatgggaggtgcctcttccgtacacgaatgcggtctgattgacgcgataaaatccggaaactataatttctgtgacagagataaagcagctacaccggaagagaaacaggaaatcgcgagagcagcattttcctgtgactggtttcttggaagtgtgaatgcgatgagtgaagatggagtgttcatcaatattgacggaaatgcaaaccgtgtagcagcatatgcatttggaccaaagaatgtacttctaattgttggtatgaacaaagttgtaaagacacaggaagatgcaatgagcagggcaagaaatgaagctgcacctgtaaatgcacagcgttttggaattgacacaccatgttccaaggctggaagctgctttgactgtaagagcccggaatgtatctgttgtcagattctggtaacaagattcagccgtcagaaaggtcgtttcaaaattattcttgtagatgagaatcttggtttctagtagccggagaagggaaaaagaatgggaaaaaatagaaagaagccggtgcgccacagattagaaaagcgacagaaacgaagcagacaaaagaaaaaaagcggtttatttgacaaagtaacaatggtggtcctggttgtggcagtctgtgtttttgcattttcgctttatcagctggtacgcacaatggtgccatattattctggtggaaaagagtatgataagctcaaaaataaagcaatcactgtacaggagcaaacagatgatccgggagatgtatcgggagacacatttaaagtagattttgatgtgcttttgcaggaaaatccagatacggtagcctggatccggtttgatgaaccatcaatcatcagttatccggttgtaaaaagtgcagataacaaagaatatctgacaaagacgttttccgcaaatgataataaactgggtgcaattttcatggacatgaaaaataagagtgatttttcagatagaaatacaatgatttatggacataacctgaaagttggcggagaaatgttttcgcagctgaaagagtatgaggaagaatctttctataaagaacatccgaatttctatatttatacaccggatggaaaaacaaggacttataccgtgttttcagcagctgtcgtgaaggatactgcagatcagtataatctgacttatgcgacagacgaagcgtttgagagttatttgaaaatgtgtaaagaagattcagcatatgacacaggaacagaagtgaatgcgcagtctcagattgtcagtctttcaacttgtaccaatgtaagagaagatgagagattccttttgcagggagtgttgacagcgacagacggaggagaaaattagaatggcagacagatttgatgtaggcgacattattaagatgaagaaaccgcatccatgcggaagtcaggagtgggagattctccgggccggagcggatttccgtctcaaatgtatgggctgcgggcaccagattatggtgccaagaaaattggtagaaaaaaatacaagacaaattacaaaaaaggcttgaaacaacaaattctttatggtattataagaaactgtgacatgctgatggaacaattccactcagtcattcaatttccttgttcccgggaggaaccgggggccaagagaccataaggaggtaaaataagatgaataagtatgaattagctgttgttgtaagcgcaaaactcgaagacgaagcaagagcagaagtaatcgagaaagtgaaagcaatgatcactcgtttcggcggtaatgtaacagacgttgatgagtggggcaagagaagattcgcttacgagatccagaaaatgaaagaaggattttattacttcatccacttcgaggctgaaagtacagttccagctgaagtagagcagcgtatccgcattatggacaatgtactcagatatttatgcgtgaaacaggaagcataagcggaaagaggtatatatgaataaagtagttttagtaggacggttaacaagagacccagaagtgagatattcacagggagacaatgctacagcggttgcaagatatacacttgctgtagatcgcagattcagaagagacggtgagccgacagcggattttattccgtgtgttatattcggacgttccgcagagtttgctgagaagtatttccatcagggaatgcgtgtctctatttccggacgtatccagacaggaagctacacgaacaaagatggtgtgaaagtatacacaacagaagtgatcgtggaagagcaggagtttgcagagagcagagccgaggcagaagctaacagagcaagtttccagcgtcagtctgcaccgagtccggcacctagcgcagatgcaggtgatggcttcatgaatatcccggatggtatcgatgaggagttaccgtttaactaagtcggaaaggagataaccatcatggcttacgaaaaaggaagcagaccagagggtggattcaaaagaagaggcccagctcgtagaagaaaaaaagtttgcgtgttctgtggtaaagagaacaacgaaatcgattacaaggacgttgcaaaattaaaaaaatatgtttctgaaagaggaaaaattcttcctagaagaattacaggaaactgtgctaagcaccagagagctcttacagtagcaatcaagagagctagacacatttctcttatgccttacgttcaggactaattgagataattagctaatagcaagatcgaatttttggagaaattcagaaattcgatctttttgctttttctaattcatttttgcgtgttttttgcataatacaacctatagcatcttaggggaaaagatgctataatagattagctatattgtaattagtcacagatgatggtgattgatagtagtcccaggtgaggtattagttatgaaaaggaataaaatgcagctgaagggacagctcagaatgtacatgcgatggccgctgatcatgacacttctcttgattggcatggatgtatggatgtacatggtggacaagaaagccggacttttgatgtcagtgatcataattatatatgtaggaatcgctttttcgctgtatttctataacagatctttgatcctggcagatctgatccagttttcagtacagtataaaggtattgaaaaccggttgctcaaagaactggcaattccctatgcgattgcgctggaggatgggaggattctgtggaagaatgattgctttttgaatctgacagagggtcagagaaaagaacgttatctgaaccgtatgattccagaattacatccgggtgtgtttccaaaaaatgatgtggatcatgtagaattggaagtaacttatcgtgaaagaagttatcaggcagagcttcgaaaagtatcattggagggatttagtgagaaagaagagttgcttcagattccggaagagcaggaatattttgttgcagtttctttaagagatgtaacagaactgaatgcctacatccgagagaacgaagatcagcgaatgattgccggattgatttatattgataactatgatgaagttatggagagtgttgaggaagtcagacaatcccttcttgtggcattgatcgaccgtaagatcaataagtatatcggagatgtagatggtatcgtaaagaaactggagaaggataaatactttatcgtacttcgaaaggatgcttataaaaagctgaaagaagacaagttttctcttctggaagaggtaaaacaggttaatatcggtaattcaagatcagcaacactgagtattggtttgggattgaatacggcaacgtatgcgttgagctaccagtatgcgcgtgtggcaatcgatcttgcacttgccagaggcggagatcaggcagttattaaggactgtaacggaataacttattttggtggtaagaaggagcagacagcgaagaatacacgagtgaaggcgcgtgttaaggctgaggcacttcgagagtttattgtgaccagagacaaagttattgttatgggtcataagattgctgatccggattcttttggtgcatgtatgggtatttaccgtgcagcagtaagtctggagaaaaaggcacatattgtgatcaatgaagttacaggatctgttcgtccgttgtatgatgagattctggagagccctgcatatgaggatgatatttttattacgtcagaacaggcattggattatgtggatgacaatgcaatggtcattgtggtagatacgaacaagccacagatgacagagtgtccggaactcttgaagaaatcaaagatgattgcagtgctggatcatcacaggcagagtagtaatattattgagaacgcggtactttcttatgtggagccgtattcttcttccacttgcgagatgatcgcagaagttctacagtatatggtagatgacatcaaattcccggcacttgaagcagagtgcatgtatgccggaattatgatcgatacgagaaactttatgaaccgtacaggtgtgagaacctttgaagcagcagcatttttgagaagatgcggtgcagatattacacgggtacgcaagatgttccgtgatgatatggcatcttatcaggcaaaggctgaggcagtccgcaatgcagaagtttatcgtaaggaatatgcgattgcagtatgtccaagcgatattgacagtcctacagtgcttgcagcacaagcggcgaatgaattgctggatattagcggaataaaggcttcttttgtattgacagaatatgaaaataagatttatatgagtgcgcgttccatcgatgaagtgaatgttcagattatcgcggagaagctcggtggaggcggtcatattaattctgcgggagcacagtttgaccacacgaatatgcatgaagcagtcagtgcattgaaagagaccattgataaaatgatagaagaaggagatatttgacaatgaaagttattttattacaggatgtaaaatctcttggaaaaaaaggagagatcgtaaacgtaaatgatggatatgcaagaaactttattcttccaaagaagcttggactggaagcaacaggaaagaatctgaatgatctgaagcttcagaagaataacgagaaaaaagttgcggaggagaacctggaggctgcgaaagaacttgcagctaagatcgcagaagctaaaattgtaacacacatcaaagttggagaaggcggaagaactttcggttctgtatcaagcaaagagattgcagaggaagtaaaagcacagttgaatcttaatgttgataaaaagaagatccagttaaaagaagcgatcaagacactcggaacacacaacgtgtctgtaaagcttcatccacaggttacagcagaactgaaagtagttgtacaggaagaagcataaggagacgaaatctttatggatatggaagcagcaatgaaacgaattcctccgcacagtgcggaggcagagcaggcagtgctcggtgcgatgctgatgaacaaggaggccatcacggtggcctccgagatattatcaggggatgatttttatcagacagcatatggaatcttgtttaattctatggtggaactgtttcatgcgggaaaaccggtcgatctgatcaccttgcaggaatatctgaaagaaaaggatgtcccgccagagatcagcagcatggagtttgcaagagatttgctgatgggaacacagacttctgcgaatatcaagagctatgctgaaattgtacgtgaaaaatcaatcatgcgtcgcctgatcaaagtaaatgaagagacggcaaatgcctgttatctgcagaatcagccattagaggagattctggaagatgcacagaagcaggtttttgcacttgcagagactgggaattcagaagagtatgtaccgatcaagcaggttgtactcaatgcattggatgtaatcgagcgtgcgtctaagacaaaaggaacagtaacaggaattccgacaggattcattgatcttgattataagttgtccggtctgcagcgctcagaccttgtactgatcgcagcccgtccttccatgggtaagacagcgtttgtattgaatatcgcacagcatgtggcatttcgtcagaataaagcagtagcaatcttcagtcttgagatgtccaaagagcagttggtaaaccgtctgttctcattggagtctcatgtggatgcacagatactaagaaccggtaatctgtcagatacggattgggagaagttgatcgaaggagccggaacaataggatcatcaagaatgatcattgatgatacgtcaggtattacgatttcagagatgcgctcaaagtgtagaaaatacaagctggagatgggacttgacctgatcattatcgactacttacagttgatgagcggaagcaattcaagaaagaatgagagccgtcagcaggagatttctgagatctcacgttctttgaaaggtcttgccagagaattgaatgtgccggtgcttgcactgtcacagctgagccgtgcggttgagcagagaacagataagcgtccgatgctttcagacctccgagaatccggagcaatcgagcaggatgccgatgtctgtatgtttatctatcgtgatgattattataatcctgacacggaagataagaacattgcagaaattattatcgcaaaacaaagaaacggcccgatcggtacagtgcgtcttgcgtggatgccacagtacactcgttttggaaacgagctgcgtcagcaggatcaggagatataaaaaagaaaaggacaggcacttgttggagagtgcctgtcttttttcgatatacaaatccaataaatctaccggtatgtgcagtgtgcaattagaaatcgcagaaatgctatgtaaatctttttttgaatctcagcaccggactattcttcacactttctcttcgggtcgcctgttgctggcgaatcaggctgtccagtttacggaaatgttcttcttcctgccgttctttcgcctggaaaagaaaatccatctcacgtatgacatctgcggtgacctgagtgctgatttctttttctaatgctttgttattttcagtaacgacttcagtcagcacttctccgatgagtgaacgtacatgttccagctgggtttctgtgatgacttcgaccggagcagcggtggtggccggtttgcactcagatgccaaatcaggtgcgggtgttttggtaagggcattcttatccttgttttcagtgtgtctcattatctgacgtgtagatttcaattctgggatcaatggcttcagatcgcgaagcagaaccccttcattcttaagtttcttaatacagcaaaagagctggatatcatcctgggtataatatcgatgtcccatctctgtgcggccgatcggaatatgaagttcctcttcccagtatcttaagacatgggattctacctgaactttcttggcggcttcagaaatcataaatctgacttcacccattgattttctatcctcctgttagaatcattgcgattactgttctgatttcgctacatttattatagcatagagaaattatgaaagaagtgctaatcgttcgtcaaattatggcaaaaaatggtaattgaagaaaggtatggaatacaaggaaaaaagttgtaaaaaaagaaatcctgccgcatctgaatcaatcagacgggcaggacttctgcgttttgtgatcacttagcgcttataaattatgcttcagagatagcgcctgtaggacaagcagcctcacaagctccgcaatctacacaagcatcagcatcgatctcatatttgccatctccttcagaaatagcgcctactggacattcgccttcgcaagtaccacagcttacacattcatcactaattacgtgtgccattgtatgtaccctccttttttggattacgataggtttttcccttttcgttatcctcattttaatacaagacggggaaatatacaagagttcctgatgtatttatttgagtaattcataagttagttttatagaacttgtgaacgtggaaaatagaagatttctatactaaattagtaaaaaaacgaaaattcacgagattttaagaaattatctcttccatttttcaaggattcgtgtatcataatggattgagagttaaaaagtagaaaacatagagataaaattgtgtaaatgaaaagaaggagaaagttatgcggaaacgaaatgtaagagcagcgattgcggcagcactttgtatgacggtacttgcagccggctgcggaaagaaggcagatgatccggtttttacaggggataagacagaagcaccggtatatcaggcaaatctggatgcaattaaatcttctgcatatgcatcggcagacaatctggatctggaacctggaacttatatttctgtaatcggaaggggatcttcaacaccgtattggaatcaggtaaaggcaggggtagagcaggcagcaactgacttgaatacagcacttggctattccggaaatgataaggtgaaagtattatacagtgcaccggatgagaatgataatatcgatcagcaggtgaatattctggatgaagagcttgcacgttatccggatgtgatcgcaatttccagtgtagatgcaagcgcatgctccgtccagtttgatcttgcgattgagaatggaattccgatcgtagcatttgattcaggaaacagctatcagaatatccaaagtacttgcaaaacgaataatatagaagcggcaacaacaggaacaaagaatttctgtgagaagatcggtgacagtggggagattctgttgcttgtgcatgatacagtatcagatacggcgaaagagcgtgaggcaggaatcaaaaatgaacttgcagcaaatcatccgaatgtgactgttacagagacaatttatctggatcagctggaaatgttgaagaaacagattgtagctgaacaggtcggggtaacaccagaagaactggcagccgcagaagcaggagaaaagaaggaagagacaacaggaacaggtgatgcttccgagacaattgcagatgcagcatcgaatgcggattcttcatcagcagacgaaagtgcgaatgagacagcacaggaagcggacaatgaattgtccgagaagatgcagcaggtcaacgatggcgcggcaaagatgagtgatgaagatgcaattcgatattatatggagaaacatcctgatttaaaaggatgtattgctacgaacgagacagtaacccagcttgcaattaagacgatggatcagcttgatgcagaaaaacatattacattagtggggtttgatgcaggaaaagagcaggttaatgcattgaaagatggaaaggtggatggacttattgtgcagaatccttttggaatgggatatgcgacagtagttgcagcggcacgtacagttcttgagattggaaatgaagctgaggtcaacacaggatatgtgtgggtgacagcagacaatatgaatgacgatacgataacaccgttcctttacgaataagttgaaaataagtcgaacaatttcataaaggaaaagagcttgtcaaaataaaaacatcaggattttattacttctatatttctgaatttcagaatgaagtataaatcctgatgttttttattttattcacgttgtcctttaagctttgcttaaagaaaaaataaattcggtgccaaccccttctgtactgattacattgatatgttcatcgtgagcctgtatgatttcttttacgatcgaaagtccaagtccagttcctttcttatcctttccacgggaaagatctgatttgtagaaacgctcccaaatcttattgatttcctttcttgagattccgattccatgatcttttacggaaacaaagattttatcatttttcgttgttacttctactgtaatagaagagtcattctcactgaatttaatcgcattatccagaagattataaagaacctgttggattttgcgtcggtccgccattacattgatctgttcagacagtagaaagagcttaatggatatatgcttctgagtacagacaccctcgaaagactgggcagtatgtttgatcatctcctgaatatcaaaggaagtcttattgagaaggagctcttttgtatcaaattcgttcaaagtaagaagatccgttgtcaggtcagtcagtcgttccgtttcgaagagaatgatatttaagtatttctcatgaagctctggtgggattgttccgtctgtcattgcttctacataccccctgattgaagtcaacggggaacggaaatcgtgggatacatttgctacgatctttttctgataatcatcagagtccttcagttgtgtagccatataattcagtgatgcggataaatatccgatctcatcatgcctgtttaccggaatctcgtaatccagattgcccatggcatattgcttcgcagcttctgtgatcagcaacaatggtcggtggacgaagaaatggaacccgagcaggaagatgaaggacaacaggaaaataactccaagagaaatataaaccggaaccatcaacgtgcggcatctttcgttgatcagagagaccgggctgtgaatgatcagatatccctttgtataaaatccctgtgtgacaggagccattacagtaatcatatcttcctgaaaataattatgataggttccgatcatgtactggttgctcccgatttcggccggatcaaaattattgacggattgtggcgcagtagtatccttcaggttggcagaggtgatcattgtaccatctttttcaacaaaccacagagaagaattaagatacgtcttcatagcagataactgagaatgaacagcccagctggaagattcgtttgaaaaataggaaggcagataattatctgcaatcatggttgcttctctgtataatgtctgcgaagtatctttttccagacgttcggtgatcagttctgtggttaatgttgctgttgtgaaaacgcataaaaacccgaaaataatataaagtacaataaattttaaatgcagaactgctttcataatttctccctaagtactcatcggccaccagatgctgtttacagtatccaggaccgatgatttaaatctattttgtctcaaatttgtaaccaattccccatacagtactgatattccagtgagggtggtctttaatcttttcgcgcagacgtttaatatgaacatcaacggtacgagtgtctccgatatattcatagccccagatacggtctaagagctgctctcttgtgaatacctgattcggtgatgcagcaagacagtaaaggagttctaattcctttggcggcatatcaacaggatgtccgtcacacacaacagagtagtttgtaagattgatcgtcaatccgtcaaactccgcacattttgttttttcaacagaagtatcattctgttgtccaacctgatatcttctcagaacagctcttacgcgggcaaccatttccttagggtc

(The sequence listing continues in the following parts.)
